(19) United States
(12) Patent Application Publication
(10) Pub. No.: US 2009/0298762 A1
(43) Pub. Date: Dec. 3, 2009

(54) CONJUGATES OF BIOLOGICALLY ACTIVE PROTEINS HAVING A MODIFIED IN VIVO HALF-LIFE

(75) Inventors: Marc Besman, Seattle, WA (US); Stewart Chipman, Bainbridge Island, WA (US); David Leung, Mercer Island, WA (US); Jack Singer, Seattle, WA (US)

Correspondence Address: TOWNSEND AND TOWNSEND AND CREW, LLP, TWO EMBARCADERO CENTER, EIGHTH FLOOR, SAN FRANCISCO, CA, 94111-3834, US

(73) Assignee: Cell Therapeutics, Inc., Seattle, WA (US)

(21) Appl. No.: 12/251,324

(22) Filed: Oct. 14, 2008

Related U.S. Application Data
(63) Continuation of application No. 11/880,377, filed on Jul. 20, 2007, now abandoned.
Application No. 11/880,377 is a continuation of application No. PCT/US2006/002501, filed on Jan. 25, 2006.
(60) Provisional application No. 60/712,585, filed on Aug. 30, 2005.
(60) Provisional application No. 60/647,119, filed on Jan. 25, 2005.

(51) Int. Cl. A61K 38/16; C07K 14/745; C07K 14/61; C07K 14/54; C07K 14/52; C07K 16/18; C07K 14/00; C07K 7/08; C07K 7/06; C07K 7/00; C07K 5/00; C12N 9/50; C12N 9/00; C07K 14/555; C07K 14/575; A61K 38/10; A61K 38/08; A61K 38/07; A61K 38/06; A61K 38/05; C07H 21/00; C12N 15/74; C12N 5/06; C12N 1/21; C12N 1/16; C12P 21/02; G01N 33/48; A61P 43/00

(52) U.S. Cl. 514/12; 530/331; 530/330; 530/329; 530/328; 530/327; 530/326; 530/325; 530/324; 530/350; 530/399; 530/351; 530/387.3; 530/387.1; 530/395; 530/384; 435/219; 435/183; 514/13; 514/14; 514/15; 514/16; 514/17; 514/18; 514/19; 536/23.1; 435/320.1; 435/325; 435/358; 435/252.3; 435/252.33; 435/254.2; 435/69.7; 436/86

(57) ABSTRACT

Disclosed are biologically active protein conjugates that comprise a biologically active polypeptide coupled via a peptide bond to a polypeptide comprising from 2 to about 500 units of a repeating peptide motif, wherein the biologically active protein conjugate exhibits a modified plasma half-life compared to the intrinsic half-life of the unconjugated biologically active polypeptide or protein. Also disclosed are methods of making and using the conjugated proteins, as well as methods for determining whether a given conjugate exhibits a modified half life relative to the intrinsic half life of the unconjugated polypeptide.

### CROSS-REFERENCE TO RELATED APPLICATIONS

[0001] The present application is a continuation of International Application No. PCT/US2006/002501 filed Jan. 25, 2006, published in English, which claims priority under 35 U.S.C 119(e) from U.S. Application No. 60/712,585, filed Aug. 30, 2005 and U.S. Application No. 60/647,119, filed Jan. 25, 2005, the contents of which are incorporated by reference.

### TECHNICAL FIELD

[0002] This invention relates generally to biologically active proteins, and more specifically to altering the half-life of biologically active proteins.

### Sequence Listing

[0003] In accordance with 37 C.F.R. §§ 1.821(c) and 1.52(e), the instant application contains a lengthy Sequence Listing which had been submitted via CD-R in lieu of a printed paper copy. Said CD-Rs, recorded on Jun. 30, 2006, are labeled CRF, “Copy 1”, “Copy 2” and “Copy 3”, respectively. Each contains only one identical 2.3 MB file (CELTH349.APP). The contents of the CD-R containing the Sequence Listing are hereby incorporated by reference (37 C.F.R. § 1.52 (e)(5)).

### BACKGROUND OF THE INVENTION

[0004] Biologically active proteins often have undesirable half-lives when administered as human therapeutics. Their intrinsic half-lives impose administration schedules and dosing regimens that often result in less than optimal therapeutic efficacy, compliance problems and patient inconvenience.

[0005] In the manufacture of biologically active proteins for human therapeutics, the extension of the half-life of biologically active proteins has been attempted through physical means (e.g., altered route of administration, nanoparticle encapsulation and liposomal entrapment), chemical modification (e.g., emulsions, pegylation and hyperglycosylation) and genetic modification (e.g., modification of primary protein structure, polymer tags, human serum albumin fusion, incorporation of post-translational modification). See, for example, Lord, et al., Clin. Cancer Res. 7:2085-2090 (2001), and van Der Auwera, et al., Am. J. Hematol. 66:245-251 (2001). However, such approaches have resulted in other problems. Extension of biologically active protein half-life through physical means often introduces increased drug substance complexity with costly and time-consuming additional downstream processes during manufacturing. Chemical modification may alter the biological activity or safety profile of the biologically active protein. Where biologically active proteins are made via recombinant DNA synthesis methodology, the effect of the genetic modification on protein yield and purity in the particular cellular expression systems issues needs to be assessed for its intended use.

[0006] Accordingly, there is a need for other approaches for modifying the intrinsic half-life of biologically active proteins.

### SUMMARY OF THE INVENTION

[0007] One aspect of the present invention is directed to a protein conjugate comprising a biologically active polypeptide coupled via a peptide bond to a polypeptide (amino acid extension) that comprises from 2 to about 500 repeating units of a peptide motif. The motif comprises a major constituent and a minor constituent, in which the major constituent is two or more residues of one amino acid selected from Gly (G), Asn (N) and Gln (Q), and the minor constituent is one or more residues of one amino acid selected from Ala (A), Ser (S), Thr (T), Asp (D), Gln (Q), Glu (E), His (H) and Asn (N), with the proviso that none of the amino acids is present in both the major constituent and said minor constituent, wherein the plasma half-life of the conjugate is modified relative to the intrinsic half-life of the unconjugated biologically active polypeptide. The term “modified”, as used herein, refers to an increased or a decreased half-life relative to the plasma half-life of the unconjugated biologically active polypeptide or protein itself (i.e., the intrinsic half life). By the phrase “intrinsic half-life” it is meant the half-life of the native biologically active polypeptide or the half-life of the polypeptide in unconjugated form (thus including recombinant forms of the native polypeptide).

[0008] In some embodiments, the peptide motif comprises 3-6 amino acid residues (i.e., 3, 4, 5 or 6). In some embodiments, wherein the peptide motif contains 5 or 6 amino acid residues, the minor constituent comprises 1 amino acid residue of said peptide. In some embodiments, the peptide motif has a sequence consisting of N and T amino acid residues, N and E amino acid residues, Q and S amino acid residues, or N and Q amino acid residues. In some embodiments, the amino acid extension is N-terminal with respect to said biologically active polypeptide; in some embodiments, it is C-terminal with respect to said biologically active polypeptide; and in other embodiments, it is situated at both the N and C-terminus with respect to said biologically active polypeptide. In some embodiments, the biologically active polypeptide is a cytokine (e.g., granulocyte colony stimulating factor (G-CSF), human growth hormone, or an interferon such as a beta-interferon or a gamma-interferon), an antibody, antibody fragment, proteolytic antibody fragment or domain, single chain antibody, genetically or chemically optimized antibody or fragment thereof, a soluble gp120 or gp160 glycoprotein, a coagulation factor, a soluble receptor such as a tumor necrosis factor (TNF)-α type II receptor, a therapeutic enzyme or erythropoietin (EPO). In some embodiments, the protein conjugate has a modified half-life that is decreased relative to the intrinsic half-life of the unconjugated biologically active polypeptide, e.g., wherein said biologically active polypeptide comprises a recombinant activated protein C or a recombinant Factor VII.

[0009] Another aspect of the present invention is directed to a composition comprising the protein conjugate and a carrier. In some embodiments, the composition is a pharmaceutical composition and the carrier is a pharmaceutically acceptable carrier.

[0010] Another aspect of the present invention is directed to a chimeric DNA molecule that encodes the protein conjugate described above, as well as a vector, together comprising the chimeric DNA molecule, and a cell transformed with the chimeric DNA molecule or a vector containing it. In some embodiments, the vector is a plasmid, e.g., pCE2. In some embodiments, the cell is a mammalian cell e.g., a Chinese hamster ovary (CHO) cell, or a bacterium e.g., E. coli, or yeast.

[0011] Yet another aspect of the present invention is directed to a method of making a biologically active protein conjugate comprising a biologically active polypeptide coupled via peptide bond to a polypeptide comprising from 2 to about 500 units of a peptide comprising as a major constituent, two or more residues of one amino acid selected from Gly (G), Asn (N) and Gln (Q), and as a minor constituent, one or more residues of one amino acid selected from Ala (A), Ser (S), Thr (T), Asp (D), Gln (Q), Glu (E), His (H) and Asn (N), provided that none of said amino acids is present in said major constituent and said minor constituent, such that said biologically active protein has a modified plasma half-life compared to intrinsic half-life of the unconjugated biologically active polypeptide, said method comprising: culturing a cell transformed with a chimeric DNA molecule encoding said protein conjugate under conditions whereby said DNA is expressed, thereby producing said protein conjugate; and extracting an expression product of said chimeric DNA molecule from said cell.

[0012] A further aspect of the present invention is directed to a method of determining whether a given protein conjugate exhibits a modified plasma half-life compared to the intrinsic half-life of the unconjugated biologically active polypeptide, comprising: a) preparing a protein conjugate comprising a biologically active polypeptide coupled via a peptide bond to a polypeptide that comprises from 2 to about 500 repeating units of a peptide motif, wherein the motif comprises a major constituent and a minor constituent, in which the major constituent comprises or consists of two or more residues of one amino acid selected from the group consisting of Gly (G), Asn (N) and Gln (Q), and the minor constituent comprises or consists of one or more residues of one amino acid selected from the group consisting of Ala (A), Ser (S), Thr (T), Asp (D), Gln (Q), Glu (E), His (H) and Asn (N), wherein none of the amino acids is present in both the major constituent and said minor constituent, and b) testing the protein conjugate to determine whether the protein conjugate has a modified plasma half-life compared to the intrinsic half-life of the unconjugated biologically active polypeptide.

### BRIEF DESCRIPTION OF THE DRAWINGS

[0013] FIG. 1 is a schematic representation of the PHO×pBSK vector.

[0014] FIG. 2 is a schematic representation of the PHO-G-CSF-NN×pBSK vector.

[0015] FIG. 3 is a schematic representation of the PHO-G-CSF-(NNT)₆₅×pBSK vector ((NNT)₆₅ disclosed as SEQ ID NO: 1).

[0016] FIG. 4 is a schematic representation of the PHO-G-CSF-(NNT)₁₅₅×pBSK vector ((NNT)₁₅₅ disclosed as SEQ ID NO: 2).

[0017] FIG. 5 is a schematic representation of the PHO-G-CSF-(NNT)₁₅₅×pCE2 vector ((NNT)₁₅₅ disclosed as SEQ ID NO: 2).

[0018] FIG. 6 is a Western blot of several different G-CSF-polypeptide conjugates and unconjugated G-CSF. NNT₆₅, NNT₁₅₅ and NNNNNTNN₆₁ disclosed as SEQ ID NOS: 1-3, respectively.

[0019] FIG. 7 is a Western blot of several different G-CSF-polypeptide conjugates and unconjugated G-CSF that were treated with PNGase F prior to electrophoresis. NNT₆₅, NNT₁₅₅ and NNNNNTNN₆₂ disclosed as SEQ ID NOS: 1-3, respectively.

[0020] FIG. 8 is a Western blot of the G-CSF-(NNT)₁₅₅ ((NNT)₁₅₅ disclosed as SEQ ID NO: 2) and G-CSF-(NNT)₆₅ ((NNT)₆₅ disclosed as SEQ ID NO: 1) constructs (in duplicate) that were expressed in CHOK1 cells grown in PROCHO4-CDM media.

### DETAILED DESCRIPTION

[0021] As used herein, the term “polypeptide” means a polymer of amino acids having no specific length, unless otherwise specified. Thus, peptides and proteins are included in the definition of “polypeptide” and these terms are used interchangeably throughout the specification, as well as in the claims. The term “polypeptide” does not exclude post-translational modifications, such as polypeptides having covalent attachment of glycosyl groups, acetyl groups, phosphate groups, lipid groups, hydroxylation of proline or lysine, and the like. Also encompassed by this definition of “polypeptide” are homologs thereof.

[0022] The term “purified” as used herein means that the biologically active protein conjugate has been purified to a level adequate for its intended use.

[0023] The present invention is directed, in a general aspect, to a protein conjugate comprising a biologically active polypeptide coupled via peptide bond to a polypeptide that comprises from 2 to about 500 units of a peptide motif that contains a major constituent of two or more residues of one amino acid selected from Gly (G), Asn (N) and Gln (Q), and a minor constituent of one or more residues of one amino acid selected from Ala (A), Ser (S), Thr (T), Asp (D), Gln (Q), Glu (E), His (H) and Asn (N), provided that none of the amino acids is present as both a major constituent and minor constituent. The protein conjugates of the present invention have a plasma half-life greater than the corresponding unconjugated biologically active polypeptide or protein.

[0024] The repeating unit of the motif generally contains 3-7 (3, 4, 5, 6 or 7) amino acid residues. Representative peptide motifs having N (Asn) as the major constituent are described in Table 1.

[0025] Representative peptide motifs having G (Gly) as the major constituent are described in Table 2.

[0026] Representative peptide motifs having Q (Gln) as the major constituent are described in Table 3.

[0027] The number of the peptide motifs ranges from 2 to about 500. Thus, the motifs including the specific peptide motifs set forth herein, may be present in the polypeptide in the following number of units: 2, 3, 4, 5, 6, 7, 8, 9, 10, 11, 12, 13, 14, 15, 16, 17, 18, 19, 20, 21, 22, 23, 24, 25, 26, 27, 28, 29, 30, 31, 32, 33, 34, 35, 36, 37, 38, 39, 40, 41, 42, 43, 44, 45, 46, 47, 48, 49, 50, 51, 52, 53, 54, 55, 56, 57, 58, 59, 60, 61, 62, 63, 64, 65, 66, 67, 68, 69, 70, 71, 72, 73, 74, 75, 76, 77, 78, 79, 80, 81, 82, 83, 84, 85, 86, 87, 88, 89, 90, 91, 92, 93, 94, 95, 96, 97, 98, 99, 100 101, 102, 103, 104, 105, 106, 107, 108, 109, 110, 111, 112, 113, 114, 115, 116, 117, 118, 119, 120, 121, 122, 123, 124, 125, 126, 127, 128, 129, 130, 131, 132, 133, 134, 135, 136, 137, 138, 139, 140, 141, 142, 143, 144, 145, 146, 147, 148, 149, 150, 151, 152, 153, 154, 155, 156, 157, 158, 159, 160, 161, 162, 163, 164, 165, 166, 167, 168, 169, 170, 171, 172, 173, 174, 175, 176, 177, 178, 179, 180, 181, 182, 183, 184, 185, 186, 187, 188, 189, 190, 191, 192, 193, 194, 195, 196, 197, 198, 199, 200 201, 202, 203, 204, 205, 206, 207, 208, 209, 210, 211, 212, 213, 214, 215, 216, 217, 218, 219, 220, 221, 222, 223, 224, 225, 226, 227, 228, 229, 230, 231, 232, 233, 234, 235, 236, 237, 238, 239, 240, 241, 242, 243, 244, 245, 246, 247, 248, 249, 250, 251, 252, 253, 254, 255, 256, 257, 258, 259, 260, 261, 262, 263, 264, 265, 266, 267, 268, 269, 270, 271, 272, 273, 274, 275, 276, 277, 278, 279, 280, 281, 282, 283, 284, 285, 286, 287, 288, 289, 290, 291, 292, 293, 294, 295, 296, 297, 298, 299, 300 301, 302, 303, 304, 305, 306, 307, 308, 309, 310, 311, 312, 313, 314, 315, 316, 317, 318, 319, 320, 321, 322, 323, 324, 325, 326, 327, 328, 329, 330, 331, 332, 333, 334, 335, 336, 337, 338, 339, 340, 341, 342, 343, 344, 345, 346, 347, 348, 349, 350, 351, 352, 353, 354, 355, 356, 357, 358, 359, 360, 361, 362, 363, 364, 365, 366, 367, 368, 369, 370, 371, 372, 373, 374, 375, 376, 377, 378, 379, 380, 381, 382, 383, 384, 385, 386, 387, 388, 389, 390, 391, 392, 393, 394, 395, 396, 397, 398, 399, 400 401, 402, 403, 404, 405, 406, 407, 408, 409, 410, 411, 412, 413, 414, 415, 416, 417, 418, 419, 420, 421, 422, 423, 424, 425, 426, 427, 428, 429, 430, 431, 432, 433, 434, 435, 436, 437, 438, 439, 440, 441, 442, 443, 444, 445, 446, 447, 448, 449, 450, 451, 452, 453, 454, 455, 456, 457, 458, 459, 460, 461, 462, 463, 464, 465, 466, 467, 468, 469, 470, 471, 472, 473, 474, 475, 476, 477, 478, 479, 480, 481, 482, 483, 484, 485, 486, 487, 488, 489, 490, 491, 492, 493, 494, 495, 496, 497, 498, 499 and 500 (thus including any subrange thereof).

[0028] As described above, the polypeptide conjugated to the biologically active polypeptide may also be referred to as an amino acid or polyamino extension (hereinafter “amino acid extension”) of the biologically active polypeptide. The amino acid extension may be situated at the N-terminus, at the C-terminus or at both the N- and C-termini, with respect to the biologically active polypeptide sequence.

[0029] Without intending to be bound by theory, Applicants believe that the amino acid extensions do not adopt stable conformations and as such, do not interfere with or otherwise influence the activity of the protein. Also, limiting the amino acid extension to two different amino acids is believed to reduce the chemical complexity of the amino acid extension, which helps minimize the potential for immunogenicity, as well as allowing for the modulation of physicochemical properties far more extensively than is possible through the use of just one type or kind of amino acid.

[0030] Broadly, the biologically active polypeptide includes any protein (including native polypeptides (i.e., as they exist in vivo) or polypeptides produced recombinantly, such as recombinant human G-CSF (rh-G-CSF) for which a modified plasma half-life would be desirable from some standpoint, particularly from a therapeutic standpoint, meaning that when delivered to a vertebrate organism, treats, e.g., cures, ameliorates, or lessens the symptoms of, a given disease in that vertebrate, or alternatively, prolongs the life of the vertebrate by slowing the progress of a terminal disease. Types of biologically active proteins include cytokines, chemokines, lymphokines, ligands, receptors, hormones, apoptosis-inducing polypeptides, enzymes, antibodies and antibody fragments, and growth factors. Examples of receptors include TNF type I receptor, IL-1 receptor type II, IL-1 receptor antagonist, IL-4 receptor and any chemically or genetically modified soluble receptors. Examples of enzymes include activated protein C, factor VII, collagenase (e.g., marketed by Advance Biofactures Corporation under the name Santyl); agalsidase-beta (e.g., marketed by Genzyme under the name Fabrazyme); dornase-alpha (e.g., marketed by Genentech under the name Pulmozyme); alteplase (e.g., marketed by Genentech under the name Activase); pegylated-asparaginase (e.g., marketed by Enzon under the name Oncaspar); asparaginase (e.g., marketed by Merck under the name Elspar); and imiglucerase (e.g., marketed by Genzyme under the name Ceredase). Examples of specific polypeptides or proteins include, but are not limited to granulocyte macrophage colony stimulating factor (GM-CSF), granulocyte colony stimulating factor (G-CSF), macrophage colony stimulating factor (M-CSF), colony stimulating factor (CSF), interferon beta (IFN-β), interferon gamma (IFNγ), interferon gamma inducing factor I (IGIF), transforming growth factor beta (TGF-β), RANTES (regulated upon activation, normal T-cell expressed and presumably secreted), macrophage inflammatory proteins (e.g., MIP-1-α and MIP-1-β), Leishmania elongation initiating factor (LEIF), platelet derived growth factor (PDGF), tumor necrosis factor (TNF), growth factors, e.g., epidermal growth factor (EGF), vascular endothelial growth factor (VEGF), fibroblast growth factor, (FGF), nerve growth factor (NGF), brain derived neurotrophic factor (BDNF), neurotrophin-2 (NT-2), neurotrophin-3 (NT-3), neurotrophin-4 (NT-4), neurotrophin-5 (NT-5), glial cell line-derived neurotrophic factor (GDNF), ciliary neurotrophic factor (CNTF), TNF α type II receptor, erythropoietin (EPO), insulin and soluble glycoproteins e.g., gp120 and gp160 glycoproteins. The gp120 glycoprotein is a human immunodeficiency virus (HIV) envelope protein, and the gp160 glycoprotein is a known precursor to the gp120 glycoprotein.

[0031] In some embodiments, it is desirable to modify the half-life of a biologically active polypeptide such that it is decreased relative to the intrinsic half life, is desirable. Such embodiments include recombinant activated protein C (e.g., marketed by Eli Lilly under the name Xigris) and recombinant Factor VII (marketed by Novo Nordisk under the name NovoSeven).

[0032] Biologically active polypeptides may be used to treat diseases such as Parkinson's disease, cancer, and heart disease. In addition, therapeutic polypeptides may be used to treat autoimmune disorders such as multiple sclerosis; Sjogren's syndrome; sarcoidosis; insulin dependent diabetes mellitus; autoimmune thyroiditis; arthritis (e.g., osteoarthritis, rheumatoid arthritis, reactive arthritis, and psoriatic arthritis); ankylosing spondylitis; and scleroderma. Also, therapeutic polypeptides of the present invention can be used to treat acute and chronic inflammatory disorders, to promote increase in stature, to promote wound healing, and to prevent rejection after transplantation of cells, tissues, or organs.

[0033] In some preferred embodiments, the polypeptide is G-CSF. G-CSF induces rapid proliferation and release of neutrophilic granulocytes to the bloodstream, thereby providing a therapeutic effect in fighting infection. As explained in U.S. Pat. No. 6,831,158, recombinant human (rh)-G-CSF is generally used for treating various forms of leukopenia (a reduced level of white blood cells) and neutropenia (a reduced level of neutrophils). Leukopenia and neutropenia result in an increased susceptibility to various infections.

[0034] Commercial preparations of rh-G-CSF are available under the names filgrastim (GRAN® and NEUPOGEN®), lenograstim (NEUTROGIN® and GRANOCYTE®) and nartograstim (NEU-UP®). GRAN® and NEUPOGEN® are non-glycosylated and produced in recombinant E. coli cells. NEUTROGIN® and GRANOCYTE® are glycosylated and produced in recombinant CHO cells. NEU-UP® is non-glycosylated with five amino acids substituted at the N-terminal region of intact rh-G-CSF produced in recombinant E. coli cells.

[0035] Aside from G-CSF, per se, G-CSF analogs that are biologically functional or have biological activity are also useful. Methods of preparing rh-G-CSF are disclosed in U.S. Pat. No. 4,810,643. Various G-CSF analogs are also reported in U.S. Pat. No. 4,810,643. The polynucleotide encoding rh-4-CSF and the amino acid structure of rh-G-CSF are both provided in U.S. Pat. No. 5,985,265.

[0036] A representative example of an amino acid sequence (and the corresponding polynucleotide sequence) of a protein conjugate of the present invention is shown in Table 4. The PHO leader sequence is included.

[0037] In the amino acid sequence, the PHO leader sequence is from amino acids 1 to 18, G-CSF is from amino acids 19 to 192, and the (NNT)₁₅₅ amino acid extension ((NNT)₁₅₅ disclosed as SEQ ID NO: 2) is from amino acids 193 to 347. The stop codon is denoted by the “*” symbol.

[0038] As depicted in the polynucleotide sequence, nucleic acids 1 to 54 encode the PHO leader sequence, nucleic acids 55 to 576 encode G-CSF, and nucleic acids 577 to 1041 encode the (NNT)₁₅₅ amino acid extension ((NNT)₁₅₅ disclosed as SEQ ID NO: 2). Nucleic acids 1042 to 1044 (TAG) constitute the stop codon.

[0039] In some embodiments, the number of repeating peptide units is between 75 and 225. Thus, in the case of a protein conjugate containing G-CSF linked to a polypeptide containing repeating units of peptide motif having the sequence NNT, embodiments of the present invention may include any of the following protein conjugates ((NNT)₇₅-(NNT)₂₂₅ disclosed as SEQ ID NOS: 4-83, 2 and 84-153, respectively, in order of appearance): G-CSF-(NNT)₇₅, G-CSF-(NNT)₇₆, G-CSF-(NNT)₇₇, G-CSF-(NNT)₇₈, G-CSF-(NNT)₇₉, G-CSF-(NNT)₈₀, G-CSF-(NNT)₈₁, G-CSF-(NNT)₈₂, G-CSF-(NNT)₈₃, G-CSF-(NNT)₈₄, G-CSF-(NNT)₈₅, G-CSF-(NNT)₈₆, G-CSF-(NNT)₈₇, G-CSF-(NNT)₈₈, G-CSF-(NNT)₈₉, G-CSF-(NNT)₉₀, G-CSF-(NNT)₉₁, G-CSF-(NNT)₉₂, G-CSF-(NNT)₉₃, G-CSF-(NNT)₉₄, G-CSF-(NNT)₉₅, G-CSF-(NNT)₉₆, G-CSF-(NNT)₉₇, G-CSF-(NNT)₉₈, G-CSF-(NNT)₉₉, G-CSF-(NNT)₁₀₀, G-CSF-(NNT)₁₀₁, G-CSF-(NNT)₁₀₂, G-CSF-(NNT)₁₀₃, G-CSF-(NNT)₁₀₄, G-CSF-(NNT)₁₀₅, G-CSF-(NNT)₁₀₆, G-CSF-(NNT)₁₀₇, G-CSF-(NNT)₁₀₈, G-CSF-(NNT)₁₀₉, G-CSF-(NNT)₁₁₀, G-CSF-(NNT)₁₁₁, G-CSF-(NNT)₁₁₂, G-CSF-(NNT)₁₁₃, G-CSF-(NNT)₁₁₄, G-CSF-(NNT)₁₁₅, G-CSF-(NNT)₁₁₆, G-CSF-(NNT)₁₁₇, G-CSF-(NNT)₁₁₈, G-CSF-(NNT)₁₁₉, G-CSF-(NNT)₁₂₀, G-CSF-(NNT)₁₂₁, G-CSF-(NNT)₁₂₂, G-CSF-(NNT)₁₂₃, G-CSF-(NNT)₁₂₄, G-CSF-(NNT)₁₂₅, G-CSF-(NNT)₁₂₆, G-CSF-(NNT)₁₂₇, G-CSF-(NNT)₁₂₈, G-CSF-(NNT)₁₂₉, G-CSF-(NNT)₁₃₀, G-CSF-(NNT)₁₃₁, G-CSF-(NNT)₁₃₂, G-CSF-(NNT)₁₃₃, G-CSF-(NNT)₁₃₄, G-CSF-(NNT)₁₃₅, G-CSF-(NNT)₁₃₆, G-CSF-(NNT)₁₃₇, G-CSF-(NNT)₁₃₈, G-CSF-(NNT)₁₃₉, G-CSF-(NNT)₁₄₀, G-CSF-(NNT)₁₄₁, G-CSF-(NNT)₁₄₂, G-CSF-(NNT)₁₄₃, G-CSF-(NNT)₁₄₄, G-CSF-(NNT)₁₄₅, G-CSF-(NNT)₁₄₆, G-CSF-(NNT)₁₄₇, G-CSF-(NNT)₁₄₈, G-CSF-(NNT)₁₄₉, G-CSF-(NNT)₁₅₀, G-CSF-(NNT)₁₅₁, G-CSF-(NNT)₁₅₂, G-CSF-(NNT)₁₅₃, G-CSF-(NNT)₁₅₄, G-CSF-(NNT)₁₅₅, G-CSF-(NNT)₁₅₆, G-CSF-NNT)₁₅₇, G-CSF-(NNT)₁₅₈, G-CSF-(NNT)₁₅₉, G-CSF-(NNT)₁₆₀, G-CSF-(NNT)₁₆₁, G-CSF-(NNT)₁₆₂, G-CSF-(NNT)₁₆₃, G-CSF-(NNT)₁₆₄, G-CSF-(NNT)₁₆₅, G-CSF-(NNT)₁₆₆, G-CSF-(NNT)₁₆₇, G-CSF-(NNT)₁₆₈, G-CSF-(NNT)₁₆₉, G-CSF-(NNT)₁₇₀, G-CSF-(NNT)₁₇₁, G-CSF-(NNT)₁₇₂, G-CSF-(NNT)₁₇₃, G-CSF-(NNT)₁₇₄, G-CSF-(NNT)₁₇₅, G-CSF-(NNT)₁₇₆, G-CSF-(NNT)₁₇₇, G-CSF-(NNT)₁₇₈, G-CSF-(NNT)₁₇₉, G-CSF-(NNT)₁₈₀, G-CSF-(NNT)₁₈₁, G-CSF-(NNT)₁₈₂, G-CSF-(NNT)₁₈₃, G-CSF-(NNT)₁₈₄, G-CSF-(NNT)₁₈₅, G-CSF-(NNT)₁₈₆, G-CSF-(NNT)₁₈₇, G-CSF-(NNT)₁₈₈, G-CSF-(NNT)₁₈₉, G-CSF-(NNT)₁₉₀, G-CSF-(NNT)₁₉₁, G-CSF-(NNT)₁₉₂, G-CSF-(NNT)₁₉₃, G-CSF-(NNT)₁₉₄, G-CSF-(NNT)₁₉₅, G-CSF-(NNT)₁₉₆, G-CSF-(NNT)₁₉₇, G-CSF-(NNT)₁₉₈, G-CSF-(NNT)₁₉₉, G-CSF-(NNT)₂₀₀, G-CSF-(NNT)₂₀₁, G-CSF-(NNT)₂₀₂, G-CSF-(NNT)₂₀₃, G-CSF-(NNT)₂₀₄, G-CSF-(NNT)₂₀₅, G-CSF-(NNT)₂₀₆, G-CSF-(NNT)₂₀₇, G-CSF-(NNT)₂₀₈, G-CSF-(NNT) 209, G-CSF-(NNT)₂₁₀, G-CSF-(NNT)₂₁₁, G-CSF-(NNT)₂₁₂, G-CSF-(NNT)₂₁₃, G-CSF-(NNT)₂₁₄, G-CSF-(NNT)₂₁₅, G-CSF-(NNT)₂₁₆, G-CSF-(NNT)₂₁₇, G-CSF-(NNT)₂₁₈, G-CSF-(NNT)₂₁₉, G-CSF-(NNT)₂₂₀, G-CSF-(NNT)₂₂₁, G-CSF-(NNT)₂₂₂, G-CSF-(NNT)₂₂₃, G-CSF-(NNT)₂₂₄ and G-CSF-(NNT)₂₂₅

[0040] In other preferred embodiments, the polypeptide is EPO. As explained in Krantz, Blood 77:419 (1991), naturally occurring EPO stimulates the division and differentiation of committed erythoid progenitors in the bone marrow and exerts its biological activity by binding to receptors and erythroid precursors. EPO has been manufactured biosynthetically using recombinant technology as the product of a cloned human EPO (hEPO) gene inserted into and expressed in Chinese hamster ovary (CHO) cells. See Egrie, et al., Immunobiol. 72:213-224 (1986). The primary structure (i.e., amino acid sequence) of the predominant, fully processed form of hEPO is illustrated in U.S. Pat. No. 6,583,272. In EPO, there are two disulfide bridges between Cys⁷-Cys¹⁶¹ and Cys²⁹-Cys³³ The molecular weight of the polypeptide chain of EPO without the sugar moieties is 18,236 DA. In the intact EPO molecule, approximately 40% of the molecular weight is accounted for by carbohydrate groups that glycosylate the protein at glycosylation sites on the protein. See Sasaki, et al., J. Biol. Chem. 262:12059 (1987).

[0041] Because hEPO is essential in red blood formation, the hormone is useful in the treatment of blood disorders characterized by low or defective red blood cell production. Clinically, EPO is used in the treatment of anemia in chronic renal failure (CRF) patients. See Eschbach, et al., NEJM 316:73-78 (1987); Eschbach, et al., Ann. Intern. Med. 111:992 (1989); Egrie, et al., Kidney Intl. 33:262 (1988); and Lim et al., Ann. Intern. Med. 110:108-114 (1989). EPO has also been used for the treatment of anemia in Acquired Immune Deficiency Syndrome (AIDS) and cancer patients undergoing chemotherapy. See R. P. Danna, et al., Erythropoietin In Clinical Applications—An International Perspective 301-324 (M. B. Garnick, ed., Marcel Dekker 1990).

[0042] Amino acid and corresponding nucleotide sequences of EPO, as well as other biologically active polypeptides useful in the present invention, are set forth in Table 5. Two other amino acid sequences of EPO are set forth in Table 6.

[0043] The protein conjugate may further comprise one or more affinity tags. Generally, an affinity tag is a polypeptide segment that facilitates isolation, purification or detection of the fusion protein containing the affinity tag. In principle, any peptide or protein for which an antibody or other specific binding agent is available can be used as an affinity tag. Representative affinity tags include a poly-histidine tract, protein A (Nilsson, et al., EMBO J. 4:1075, (1985); Nilsson, et al., Methods Enzymol. 198:3, (1991)), glutathione S transferase (Smith et al., Gene 67:31 (1988)), maltose binding protein (Kellerman et al., Methods Enzymol. 90:459-463 (1982); Guan, et al., Gene 67:21-30 (1987)), Glu-Glu affinity tag (Grussenmeyer, et al., Proc. Natl. Acad. Sci. USA 82:7952-4 (1985); see oNDEPHO-1R), substance P, Flag™ peptide (Hopp, et al., Biotechnology 6:1204-10 (1988)), streptavidin binding peptide, thioredoxin, ubiquitin, cellulose binding protein, T7 polymerase, or other antigenic epitope or binding domain. See, in general, Ford, et al., Protein Expression and Purification 2:95-107 (1991). DNAs encoding affinity tags are available from commercial suppliers (e.g., Pharmacia Biotech, Piscataway, N.J.; New England Biolabs, Beverly, Mass.; and Eastman Kodak, New Haven, Conn.).

[0044] As in the case of the amino acid extension, the affinity tag may be situated at the N-terminal, C-terminal, or both N-terminal and C-terminal with respect to the biologically active polypeptide sequence.

[0045] The present invention is also directed to a method of making the protein conjugates. The method involves culturing a cell transformed with a chimeric DNA molecule encoding the protein conjugate under conditions whereby the DNA is expressed, thereby producing the protein conjugate; and extracting an expression product of the chimeric DNA molecule from the cell or culture medium (or a milleau from the cell culture). In contrast to protein conjugates formed by chemical means (e.g., the commercial product NEULASTA (PEG-G-CSF, which is a covalent conjugate of recombinant methionyl human G-CSF and monomethionyl polyethylene glycol), the conjugation in the present invention is performed recombinantly as opposed, to through physical or chemical means, resulting in the production of the biologically active protein and the polypeptide as components of a continuous protein. A linker, e.g., about 10-20 amino acids in length, may be used to join the protein with the amino acid extension.

[0046] The chimeric DNA molecule includes a gene or polynucleotide fragment that encodes a protein portion and one or more gene fragments e.g., oligonucleotides that together encode the polypeptide or amino acid extension. Oligonucleotides encoding the peptide motifs contained in the amino acid extension (and which encode the peptide motifs specifically disclosed herein) are set forth in Table 7. (The one-letter symbols used in Table 7 are explained in Table 8.) The DNA molecules may further contain fragments that encode affinity tags, linkers, as well as 5′ and 3′ regulatory elements. The gene or polynucleotide that encodes a protein portion may be any gene or polynucleotide known to encode the desired protein or polypeptide of the protein portion. Such genes and polynucleotides, and the primers used to generate them, are protein or polypeptide specific and well known in the art. The ligated oligonucleotides encoding the polypeptide portion may be produced according to procedures set forth above and described in Example 1. The oligonucleotides may be of any length, but are preferably designed to avoid the use of repetitive DNA sequences that are known to inhibit transcription. For instance, ligated oligonucleotides containing combinations of two glutamate codons are less likely to adopt a structural configuration that impedes gene expression than a polynucleotide made up of only one glutamate codon. The chimeric DNA molecule encoding the protein conjugate of the present invention may be engineered to contain codons encoding methionine (M) and/or proline (P) amino acid at its 5′ end to facilitate expression.

[0047] The conjugates of the present invention are made via standard recombinant techniques in molecular biology. In some embodiments, a gene or polynucleotide encoding the biologically active protein is first cloned into a construct, e.g., a plasmid or other vector. Then, the oligonucleotides that encode the repeating units of the polypeptide portion are cloned into the construct through a ligation or multimerization scheme, in which the oligonucleotides are ligated together to form a polynucleotide that encodes the polypeptide portion. In this manner, the oligonucleotides are added to the gene or polynucleotide that encodes the protein portion, thereby producing the chimeric DNA molecule within the construct. As an option, the chimeric DNA molecule may be transferred or cloned into another construct that is a more appropriate expression vector. At this point, a host cell capable of expressing the chimeric DNA molecule is transformed with the chimeric DNA molecule. The transformation may occur with or without the utilization of a carrier, such as an expression vector. Then, the transformed host cell is cultured under conditions suitable for expression of the chimeric DNA molecule, resulting in the encoding of the protein conjugate.

[0048] Methods of ligation or multimerization useful in the present invention are well known. See, Joseph Sambrook, et al., Molecular Cloning: A Laboratory Manual, 2^{nd} ed., 1.53 (Cold Spring Harbor Laboratory Press 1989).

[0049] The cloning process may take place through “directional cloning”, which is well known in the art. Directional cloning refers to the insertion of a polynucleotide into a plasmid or vector in a specific and predefined orientation. Once cloned into a vector, a polynucleotide sequence can be lengthened at its 3′ end or other polynucleotides inserted at its 5′ and/or 3′ ends. Such a design provides an efficient and relatively easy way to create large polymers without having to perform multiple rounds of ligation. The vector preferably contains restriction sites upstream of a cloned polynucleotide, but downstream of regulatory elements required for expression to facilitate the insertion of the second polynucleotide.

[0050] To facilitate directional cloning, “adapter oligonucleotides” may be ligated to the 5′ and 3′ ends of the chimeric DNA molecule encoding the protein conjugate. Preferably, the adapters contain restriction sites that are compatible with those present in the expression vector. The 3′ adapter oligonucleotide may also comprise a stop codon to designate the end of the encoding sequence to which it is ligated. The oligonucleotides encoding the polypeptide portion are preferably added in excess of the adapter oligonucleotides to increase the likelihood that a long polynucleotide is generated after ligation.

[0051] The methodology is not limited to any particular cloning strategy. The skilled artisan may use any variety of cloning strategies to produce a construct that comprises a chimeric DNA molecule of the present invention.

[0052] The chimeric DNA molecule can be introduced into the host cells in accordance with known techniques well known to those skilled in the art. These techniques include, but are not limited to, transformation using calcium phosphate co-precipitated chimeric DNA molecules, lipidic reagent co-transfection (i.e., Lipofectamine), electroporation, transduction by contacting the cells with a virus, or microinjection of the chimeric DNA molecules into the cells. The host cell can be a higher eukaryotic cell, such as a mammalian cell, or a lower eukaryotic cell, such as a yeast cell, or the host cell can be a prokaryotic cell, such as a bacterial cell. Suitable prokaryotic hosts for transformation include E. coli, Bacillus subtilis, Salmonella typhimurium and various species within the genera Pseudomonas, Streptomyces, and Staphylococcus, although others may also be employed as a matter of choice.

[0053] A wide variety of host/expression vector combinations are employed in expressing the protein conjugates of the present invention. Generally, recombinant expression vectors will include origins of replication and selectable markers permitting transformation of the host cell (e.g., dihydrofolate reductase or neomycin resistance for eukaryotic cell culture, or such as tetracycline or ampicillin resistance in E. coli, or the S. cerevisiae TRP1 gene), and a promoter derived from a highly-expressed gene to direct transcription of a downstream structural sequence. Such promoters can be derived from operons encoding glycolytic enzymes such as 3-phosphoglycerate kinase (PGK), A-factor, acid phosphatase, or heat shock proteins, among others. The heterologous structural sequence is assembled in appropriate phase with translation initiation and termination sequences, and in some embodiments, a leader sequence capable of directing secretion of translated protein conjugate. The vector will further comprise an origin of replication to ensure maintenance of the vector and to, if desirable, provide amplification within the host.

[0054] Useful expression vectors that can be used include, for example, segments of chromosomal, non-chromosomal and synthetic DNA sequences. Suitable vectors include, but are not limited to, derivatives of SV40 and pcDNA and known bacterial plasmids such as col EI, pCR1, pBR322, pMal-C2, pET, pGEX as described by Smith, et al., Gene 67:31-40 (1988), pMB9 and derivatives thereof, plasmids such as RP4, phage DNAs such as the numerous derivatives of phage I such as NM989, as well as other phage DNA such as M13 and filamentous single stranded phage DNA; yeast plasmids such as the 2 micron plasmid or derivatives of the 2m plasmid, as well as centomeric and integrative yeast shuttle vectors; vectors useful in eukaryotic cells such as vectors useful in insect or mammalian cells; vectors derived from combinations of plasmids and phage DNAs, such as plasmids that have been modified to employ phage DNA or the expression control sequences; and the like. The requirements are that the vectors are replicable and viable in the host cell of choice. Low- or high-copy number vectors may be used as desired.

[0055] For example in a baculovirus expression system, both non-fusion transfer vectors, such as, but not limited to pVL941 (BamnHI cloning site, available from Summers, et al., Virology 84:390-402 (1978)), pVL1393 (BamHI, SmaI, Xbal, EcoRI, NotI, XmaIII, BglII and PstI cloning sites; Invitrogen), pVL1392 (BglII, PstI, NotI, XmaIII, EcoRI, XbalI, SmaI and BamHI cloning site; Summers, et al., Virology 84:390-402 (1978) and Invitrogen) and pBlueBacIII (BamHI, BglII, PstI, NcoI and HindIII cloning site, with blue/white recombinant screening, Invitrogen), and fusion transfer vectors such as, but not limited to, pAc700 (BamRI and KpnI cloning sites, in which the BamHI recognition site begins with the initiation codon; Summers, et al., Virology 84:390-402 (1978)), pAc701 and pAc70-2 (same as pAc700, with different reading frames), pAc360 (BamHI cloning site 36 base pairs downstream of a polyhedrin initiation codon; Invitrogen (1995)) and pBlueBacHisA, B, C (three different reading frames with BamNI, BglII, PstI, NcoI and HindIII cloning site, an N-terminal peptide for ProBond purification and blue/white recombinant screening of plaques; Invitrogen (220) can be used.

[0056] Mammalian expression vectors will comprise an origin of replication, a suitable promoter and enhancer, and also any necessary ribosome binding sites, polyadenylation site, splice donor and acceptor sites, transcriptional termination sequences, and 5′ flanking nontranscribed sequences. DNA sequences derived from the SV40 splice, and polyadenylation sites may be used to provide the required nontranscribed genetic elements. Mammalian expression vectors contemplated for use in the invention include vectors with inducible promoters, such as the dihydrofolate reductase promoters, any expression vector with a DHFR expression cassette or a DHFR/methotrexate co-amplification vector such as pED (PstI, SalI, SbaI, SmaI and EcoRI cloning sites, with the vector expressing both the cloned gene and DHFR; Randal J. Kaufman, 1991, Randal J. Kaufman, Current Protocols in Molecular Biology, 16,12 (1991)). Alternatively a glutamine synthetase/methionine sulfoximine co-amplification vector, such as pEE14 (HindIII, XbalI, SmaI, SbaI, EcoRI and BclI cloning sites in which the vector expresses glutamine synthetase and the cloned gene; Celltech). A vector that directs episomal expression under the control of the Epstein Barr Virus (EBV) or nuclear antigen (EBNA) can be used such as pREP4 (BamHI, sfiI, XhoI, NotI, NheI, HindIII, NheI, PvuII and KpnI cloning sites, constitutive RSV-LTR promoter, hygromycin selectable marker; Invitrogen), pCEP4 (BamHI, SfiI, XhoI, NotI, NheI, HindIII, NheI, PvuII and KpnI cloning sites, constitutive hCMV immediate early gene promoter, hygromycin selectable marker; Invitrogen), pMEP4 (KpnI, PvuI, NheI, HindIII, NotI, XhoI, SfiI, BamHI cloning sites, inducible methallothionein IIa gene promoter, hygromycin selectable marker, Invitrogen), pREP8 (BamHI, XhoI, NotI, HindIII, NheI and KpnI cloning sites, RSV-LTR promoter, histidinol selectable marker; Invitrogen), pREP9 (KpnI, NheI, HindIII, NotI, XhoI, SfiI, BamHI cloning sites, RSV-LTR promoter, G418 selectable marker; Invitrogen), and pEBVHis (RSV-LTR promoter, hygromycin selectable marker, N-terminal peptide purifiable via ProBond resin and cleaved by enterokinase; Invitrogen).

[0057] Selectable mammalian expression vectors for use in the invention include, but are not limited to, pRc/CMV (HindIII, BstXI, NotI, SbaI and ApaI cloning sites, G418 selection, Invitrogen), pRc/RSV (HindIII, SpeI, BstXI, NotI, XbaI cloning sites, G418 selection, Invitrogen) and the like. Vaccinia virus mammalian expression vectors (see, for example, Randall J. Kaufman, Current Protocols in Molecular Biology 16.12 (Frederick M. Ausubel, et al., eds. Wiley 1991) that can be used in the present invention include, but are not limited to, pSC11 (SmaI cloning site, TK- and β-gal selection), pMJ601 (SalI, SmaI, AflI, NarI, BspMII, BamHI, ApaI, NheI, SacII, KpnI and HindIII cloning sites; TK- and β-gal selection), pTKgptF1S (EcoRI, PstI, SalII, AccI, HindIII, SbaI, BamHI and Hpa cloning sites, TK or XPRT selection) and the like.

[0058] Yeast expression systems that can also be used in the present include, but are not limited to, the non-fusion pYES2 vector (XbaI, SphI, ShoI, NotI, GstXI, EcoRI, BstXI, BamHI, SacI, KpnI and HindIII cloning sites, Invitrogen), the fusion pYESHisA, B, C (XbalI, SphI, ShoI, NotI, BstXI, EcoRI, BamHI, SacI, KpnI and HindIII cloning sites, N-terminal peptide purified with ProBond resin and cleaved with enterokinase; Invitrogen), pRS vectors and the like.

[0059] One particularly preferred vector for use in the present invention is the plasmid pCE2. The pCE2 plasmid may be obtained by any method known in the art. One such method, which was utilized in Example 2.A., is described in Leung, et al., Proc. Natl. Acad. Sci. USA 92:4813-4817 (1995).

[0060] In a preferred embodiment, the chimeric DNA molecules can be inserted into an expression vector that already contains the necessary elements for the transcription and translation of the inserted chimeric DNA molecule.

[0061] In addition, the expression vector containing the chimeric DNA molecule may include drug selection markers. Such markers aid in cloning and in the selection or identification of vectors containing chimeric DNA molecules. For example, genes that confer resistance to neomycin, puromycin, hygromycin, dihydrofolate reductase (DHFR), guanine phosphoribosyl transferase (GPT), zeocin, and histidinol are useful selectable markers. Alternatively, enzymes such as herpes simplex virus thymidine kinase (tk) or chloramphenicol acetyltransferase (CAT) may be employed. Immunologic markers also can be employed. Any known selectable marker may be employed so long as it is capable of being expressed simultaneously with the nucleic acid encoding a gene product. Further examples of selectable markers are well known to one of skill in the art and include reporters such as enhanced green fluorescent protein (EGFP), beta-galactosidase (β-gal) or chloramphenicol acetyltransferase (CAT).

[0062] Consequently, mammalian and typically human cells, as well as bacterial, yeast, fungi, insect, nematode and plant cells can used in the present invention as host cells and may be transformed by the expression vector as defined herein. In some cellular hosts, such as mammalian cells, the cell containing the chimeric DNA molecule may be “isolated” in that it is removed from its original environment (e.g., the natural environment if it is naturally occurring). In other embodiments, such as plants, the cells do not have to be isolated in that the whole plant may be used rather than a culture of plant cells or parts.

[0063] Examples of suitable cells include, but are not limited to, VERO cells, HELA cells such as ATCC No. CCL2, CHO cell lines such as ATCC No. CCL61, COS cells such as COS-7 cells and ATCC No. CRL 1650 cells, W138, BHK, HepG2, 3T3 such as ATCC No. CRL6361, A549, PC12, K562 cells, 293 cells, Sf9 cells such as ATCC No. CRL1711 and Cv1 cells such as ATCC No. CCL70.

[0064] Other suitable cells that can be used in the present invention include, but are not limited to, prokaryotic host cells strains such as Escherichia coli, (e.g., strain DH5-α), Bacillus subtilis, Salmonella typhimurium, or strains of the genera of Pseudomonas, Streptomyces and Staphylococcus. Further suitable cells that can be used in the present invention include yeast cells such as those of Saccharomyces such as Saccharomyces cerevisiae.

[0065] Host cells containing the polynucleotides of interest can be cultured in conventional nutrient media (e.g., Ham's nutrient mixture) modified as appropriate for activating promoters, selecting transformants or amplifying genes. The culture conditions, such as temperature, pH and the like, are those previously used with the host cell selected for expression, and will be apparent to the ordinarily skilled artisan. Cells are typically harvested by centrifugation, disrupted by physical or chemical means, and the resulting crude extract retained for further purification. Microbial cells employed in expression of proteins can be disrupted by any convenient method, including freeze-thaw cycling, sonication, mechanical disruption, or use of cell lysing agents, all of which are well known to those skilled in the art. Embodiments that involve cell lysis may entail use of a buffer that contains protease inhibitors that limit degradation after expression of the chimeric DNA molecule. Suitable protease inhibitors include leupeptin, pepstatin or aprotinin. The supernatant then may be precipitated in successively increasing concentrations of saturated ammonium sulfate.

[0066] The protein conjugates product may be purified via one or more techniques. Typically, purification entails combinations of individual procedures such as gel filtration, affinity purification, salt fractionation, ion exchange chromatography, size exclusion chromatography, hydroxylapatite adsorption chromatography, hydrophobic interaction chromatography and gel electrophoresis. Protein refolding steps can be used, as necessary, in completing configuration of the protein conjugate. High performance liquid chromatography (HPLC) is often useful for final purification steps. See, in general, Robert K. Scopes, Protein Purification: Principles and Practice (Charles R. Castor, ed., Springer-Verlag 1994) and Joseph Sambrook, Molecular

Cloning: A Laboratory Manual, 2^{nd} edition (Cold Spring Harbor Laboratory Press 1989). Examples of multi-step purification separations are also described in Baron, et al., Crit. Rev. Biotechnol. 10:179-90 (1990) and Below, et al., J. Chromatogr. A. 679:67-83 (1994).

[0067] The conjugates are tested prior to use to determine whether they exhibit modified plasma half-life compared to the unconjugated protein. For example, in experiments conducted with G-CSF and various amino acid extensions such as (NNT), Applicants found that the half-life was increased in one case, and in other cases, was decreased. The tests may be conducted in accordance with standard techniques in pharmacokinetics, as shown in example 3. This procedure entails administration of a predetermined dose of the conjugate to an animal, preferably a laboratory animal such as a rodent, e.g., mouse, collect plasma from the animal at predetermined intervals, and analyze the plasma e.g., via Enzyme-Linked Immunosorbent Assay (“ELISA”), to determine concentration of the conjugate, until concentration was no longer measurable. The half-life may be calculated via a non-compartmental pharmacokinetic analysis (e.g., using WINNonLin software version 4.1). In addition to the last time at which the conjugate concentration was measurable (t_{f}), the analysis includes observation or calculation of the following main parameters: λ_{z}, apparent terminal rate constant associated to the apparent terminal phase, estimated by linear regression analysis of the logarithm of the plasma concentrations versus time in the monoexponential terminal part of the curve, t_{1/2,x}, apparent terminal half-life, calculated according to the following equation: t_{1/2,z}=ln(2)λ_{z}; AUC, area under the plasma concentration-time curve from time zero to infinity; AUC/D, area under the plasma concentration-time curve per unit of dose; MRT, mean residence time calculated as the ratio between the area under the first moment curve, AUMC, and AUC; CL, systemic clearance, calculated as CL=D/AUC; and VS, steady state volume of distribution, calculated as Vₛₛ=CL*MRT.

[0068] A further aspect of the present invention relates to a composition comprising the protein conjugate and a carrier. Broadly, the carrier may be a culture medium or a matrix (e.g., a purification matrix). In some embodiments, the carrier is a pharmaceutically acceptable carrier, in which case the composition is useful for preventing or treating disorders and/or diseases in a human or animal, most preferably in a mammal, or for diagnostic purposes. As an active ingredient of the composition, the protein conjugate is preferably in a soluble form.

[0069] Generally, the composition comprises a pharmaceutically effective amount of the protein conjugate which achieves the desired effect e.g., therapeutic or diagnostic. Pharmaceutically effective amounts can be estimated from cell culture assays. For example, a dose can be formulated in animal models to achieve a circulating concentration range that includes or encompasses a concentration point or range having the desired effect in an in vitro system. See, e.g., Molineux, et al., Exp. Hematol. 27:1724-34 (1999). This information can thus be used to accurately determine the doses in other mammals, including humans and animals. In general, dosage amounts range from about 1 ng/kg to about 10 mg/kg based on weight of the subject.

[0070] Toxicity and therapeutic efficacy of such compounds can be determined by standard pharmaceutical procedures in cell cultures or in experimental animals. See, e.g., Molineux, et al., Exp. Hematol. 27:1724-34 (1999). For example, the LD50 (the dose lethal to 50% of the population) as well as the ED50 (the dose therapeutically effective in 50% of the population) can be determined using methods known in the art. The dose ratio between toxic and therapeutic effects is the therapeutic index that can be expressed as the ratio between LD50 and ED50 compounds that exhibit high therapeutic indices.

[0071] The data obtained from the cell culture and animal studies can be used in formulating a range of dosage of such compounds which lies preferably within a range of circulating concentrations that include the ED50 with little or no toxicity.

[0072] The compositions can be administered via any suitable route such as locally, orally, systemically, intravenously, intramuscularly, mucosally, transdermally (e.g., via a patch). They may be encapsulated in liposomes, microparticles, microcapsules, nanoparticles and the like. Techniques for formulating and administering biologically active polypeptides are also disclosed in Remington: The Science and Practice of Pharmacy (Alfonso R. Gennaro, et al., eds. Philadelphia College of Pharmacy and Science 2000).

[0073] In order to fully illustrate the present invention and advantages thereof, the following specific examples are given, it being understood that the same are intended only as illustrative and in no way limitative.

### Example 1

### Cloning of Chimeric DNA Molecule

[0074] For ease of downstream protein purification, it was decided that the G-CSF-polymer proteins were secreted into the cell culture medium. Prior experience using bacterial (ST2) secretion signals with various cytokine-polymer constructs showed low secretion efficiency in both prokaryotic and eukaryotic systems. However, the use of the Schizosaccharomycen pombe secretion signal sequence of the phol+acid phosphatase (PHO) for the secretion of heterologous proteins (GFP and HPV 16 E7) into a medium was known. Therefore, this secretion signal was tested with the G-CSF-polymer constructs described below in a CHO cell expression system. Also described below are the vectors that were synthesized for the production of G-CSF-polymer constructs and expression of G-CSF-polymers.

1.A. Production Of PHO×pBSK Construct
PHO×pBSK Construct

[0075] The first construct synthesized was simply the PHO leader sequence cloned into the bacterial cloning vector pBSK. The amino acid sequence of the PHO secretion signal is listed below.

(SEQ ID NO: 154)

M F L Q N L F L G F L A V V C A N A

[0076] The PHO secretion signal was synthesized by fusing two sets of complementary DNA oligonucleotides together and cloning them into pBSK. The most important consideration that went into the design of the oligonucleotides was that the fusion of the leader sequence to the N-terminus of the G-CSF-polymer be direct, without any intervening sequence. This ensured that the entire secretion signal was clipped from the molecule during processing, resulting in a secreted form of G-CSF with no amino-terminal modification when compared to naturally occurring and clinically available versions of G-CSF. By preparing the constructs in this manner, not only could direct comparisons to G-CSF and PEG-G-CSF be made, but this also limited any potential immunogenicity by introducing additional amino acids into the recombinant G-CSF protein. By incorporating restriction sites into the oligonucleotides for cloning the PHO leader into pBSK, as well as the subsequent cloning G-CSF into PHO×pBSK, these requirements were satisfied. The oligonucleotides that were used are listed below.

oNDEPHO-1F:

(SEQ ID NO: 155)

5′-GGCCGCCATATGTTCTTGCAAAATTTATTCCTTGGCT-3′
oNDEPHO-1R:

(SEQ ID NO: 156)

5′-CCAAAAAGCCAAGGAATAAATTTTGCAAGAACATATGGC-3′
oNDEPHO-2F:

(SEQ ID NO: 157)

5′-TTTTGGCCGTTGTTTGCGCAAACGCGTCCCGCAGGTG-3′
oNDEPHO-2R:

(SEQ ID NO: 158)

5′-GATCCACCTGCGGGACGCGTTTGCGCAAACAACGG-3′

[0077] A diagram of the PHO×pBSK vector is shown in FIG. 1. The PHO leader (PhoA) was cloned into pBSK using NotI and BamHI. The sequence for mature G-CSF was cloned into this construct utilizing the BspMI and BamHI sites. This vector confers ampicillin resistance (bla) when grown in bacteria.

### Method Of Construction

[0078] Complementary pairs of oligonucleotides (oNDEPHO-1F and oNDEPHO-1R) and (oNDEPHO-2F and oNDEPHO-2R) were phosphorylated using T4 Polynucleotide Kinase (PNK). The T4 PNK was heat-inactivated and the oligonucleotide pairs were allowed to slowly anneal on ice. The reactions were diluted in TE and used in a ligation with pBSK previously digested using NotI and BamHI. Ligation products were electroporated into Top10 competent cells and grown on LB-ampicillin plates. Minipreps were performed on ampicillin resistant colonies to isolate DNA and diagnostic digests identified putative clones. Sequence analysis determined which of the putative clones were correct.

1.B. Production Of PHO-G-CSF-NN×pBSK Construct
PHO-G-CSF-NN×pBSK Construct

[0079] This construct resulted from the cloning of PCR amplified material corresponding to the coding sequence of mature G-CSF into the PHO×pBSK vector using BspMI and BamHI. As stated previously, the oligonucleotides used for this purpose were designed to ensure that the junction between PHO and G-CSF had no intervening sequence by utilizing the restriction enzyme BspMI. Furthermore, the C-terminus of G-CSF had a direct fusion of two asparagine residues (NN) and restriction sites for the enzymes BbsI and BamHI. BbsI was subsequently utilized to directly add the NNT polymer to the C-terminus of G-CSF, while BamH was used to clone GCSF-NN into the vector.

[0080] The oligonucleotides that were synthesized to amplify G-CSF are as follows:

oBspMIGCSF:

(SEQ ID NO: 159)

5′-CGATCGACCTGCAAGTCGCGACTCCGCTGGGTCCAGCTA-3′
oGCSFBbsBam:

(SEQ ID NO: 160)

5′-CGGGATCCGAAGACGTGTTGTTAGGCTGGGCAAGGTGGC-3′ 3′

[0081] A diagram of the PHO-G-CSF-NN×pBSK vector is shown in FIG. 2. The sequence for mature G-CSF-NN was cloned into PHO×pBSK using BspMI (destroyed) and BamHI. The subsequent addition of an NNT polymer utilized the BbsI and BamHI sites indicated on the plasmid map. This vector confers ampicillin resistance (bla) when grown in bacteria.

### Method Of Construction

[0082] G-CSF was amplified by PCR using oBspMIGCSF and oGCSFBbsBam oligonucleotides. The 520 bp band corresponding to mature G-CSF was excised from an agarose gel and purified. The purified fragment was digested with BspMI and BamHI, purified and ligated into PHO×pBSK cut with the same enzymes. The ligation products were electroporated into Top10 competent cells and grown on LB-ampicillin plates. Minipreps were performed on ampicillin resistant colonies to isolate DNA and diagnostic digests identified putative clones. Sequence analysis determined which of the putative clones were correct.

1.C. Production Of PHO-G-CSF-(NNT)₆₅×pBSK Construct ((NNT)₆₅ disclosed as SEQ ID NO: 1)
PHO-G-CSF-(NNT)₆₅×pBSK Construct ((NNT)₆₅ disclosed as SEQ ID NO: 1)

[0083] The amino acid composition of this polymer encodes for the consensus mammalian N-linked glycosylation site, N-X-(S/T). Therefore, the polymer may be glycosylated on the threonine residues of the polymer extension when this construct is expressed in CHO cells. The expectation was that the polymeric increase in translated product size and posttranslational modification would modulate the pK parameters of G-CSF, conferring upon the protein-enhanced half-life in serum without decreasing its biological activity.

[0084] The construction of this polymer was achieved using an oligonucleotide ligation/multimerization scheme. By cutting the PHO-G-CSF-NN×pBSK construct with BbsI, a four base underhang (GTTG) was created in the two asparagines residues added to the C-terminus of G-CSF. By designing complementary sets of oligonucleotides that code for repeating NNT triplets as well as anneal to the GTTG underhang, it was possible to multimerize the oligonucleotides that code for 9 amino acids into longer chains. Short adaptors containing a stop codon, a BbsI site for future extension of the polymer and a BamHI site were added in low ratios to terminate the multimerization and allow for cloning of the BbsI-BamHI polymer fragment into PHO-G-CSF-NN×pBSK.

[0085] The oligonucleotides used to synthesize the (NNT)₆₅ polymer ((NNT)₆₅ disclosed as SEQ ID NO: 1) are listed below:

### Polymer Backbone Oligonucleotides

(SEQ ID NO: 161)

| | |
|---|---|
| o3NNTF: | 5′-CAACACCAACAATACCAACAATACAAA-3′ |

(SEQ ID NO: 162)

| | |
|---|---|
| o3NNTR: | 5′-GTTGTTTGTATTGTTGGTATTGTTGGT-3′ |

### Adaptor Oligonucleotides

| | | |
|---|---|---|
| oDent3F: | 5′-CAACTAGTCTTCG-3′ | (SEQ ID NO: 163) |
| oDent3R: | 5′-GATCCGAAGACTA-3′ | (SEQ ID NO: 164) |

[0088] The following sequence (NTNNTNNTN) (SEQ ID NO: 165) was the repeating unit of the NNT polymer that was produced using the polymer backbone oligonucleotides of o3NNTF and o3NNTR, which show a CAAC overhang and GTTG underhang respectively that were used to multimerize the polymer.

(SEQ ID NO: 165)

N T N N T N N T N

(SEQ ID NO: 166)

| | |
|---|---|
| 5′-C AAC ACC AAC AAT ACC AAC AAT ACA AA-3′ | (o3NNTF) |

(SEQ ID NO: 167)

| | |
|---|---|
| 3′-TGG TTG TTA TGG TTG TTA TGT TTG TTG-5′ | (o3NNTR) |

[0089] The following is the terminating adaptor molecule that completed the polymer and included a stop codon, BbsI site for future extension of the polymer and a BamHI site that is necessary for cloning.

### Terminating Adaptor Molecule

| | | |
|---|---|---|
| N * | | |
| 5′-C AAC TAG TCT TCG-3′ | (oDent3F) | (SEQ ID NO: 168) |
| 3′-ATC AGA AGC CTA G-5′ | (oDent3R) | (SEQ ID NO: 169) |
| BbsI BamHI | | |

[0091] A diagram of the PHO-4-CSF-(NNT)₆₅×pBSK vector ((NNT)₆₅ disclosed as SEQ ID NO: 1) is shown in FIG. 3. The addition of (NNT)₆₅ polymer ((NNT)₆₅ disclosed as SEQ ID NO: 1) utilized the BbsI site (destroyed) that was located at the C-terminus of G-CSF and BamHI. As shown in FIG. 3, the BbsI site was regenerated at the end of the (NNT)₆₅ polymer ((NNT)₆₅ disclosed as SEQ ID NO: 1) for future extension of length. This vector confers ampicillin resistance (bla) when grown in bacteria.

### Method Of Construction

[0092] Complementary pairs of polymer backbone oligonucleotides (o3NNTF and o3NNTR) and adaptor oligonucleotides (oDent3F and oDent3R) were phosphorylated using T4 PNK. The T4 PNK was heat-inactivated and the oligonucleotide pairs were allowed to slowly anneal on ice. Polymer multimerization was performed by mixing polymer and adaptor duplexes at 20:1 and 40:1 ratios with T4 Ligase. The T4 ligase was heat-inactivated and the entire ligation reactions were digested with BamHI overnight. Both reactions were precipitated and ran on an acrylamide gel. Material between 250 bp −800 bp was excised and gel purified.

[0093] This material was used in a ligation with PHO-G-CSF-NN×pBSK that had been digested with BbsI and BamHI. Chemically competent Stbl2 cells were transformed with the ligation products and grown on LB-ampicillin plates. Minipreps were performed to isolate DNA and diagnostic digests identified putative clones. Sequence analysis determined which of the putative clones were correct.

[0094] The longest clone isolated from this strategy was PHO-G-CSF-(NNT)₆₅×pBSK ((NNT)₆₅ disclosed as SEQ ID NO: 1)

1.D. Production Of PHO-G-CSF-(NNT)₁₅₅×pBSK Construct ((NNT)₁₅₅ disclosed as SEQ ID NO: 2)
PHO-G-CSF-(NNT)₁₅₅×pBSK Construct (NNT)₁₅₅ disclosed as SEQ ID NO: 2)

[0095] The construction of this clone required the addition of additional NNT residues to the PHO-G-CSF-(NNT)₆₅×pBSK construct ((NNT)₆₅ disclosed as SEQ ID NO: 1) using the same oligomerization scheme. The nucleotide composition of the oligonucleotides used in this extension was altered to identify the junction between the original polymer and the extension. These alterations maintained the original NNT composition of the polymer and utilized the same GTTG underhang and CAAC overhang strategy. By digesting PHO-GCSF-(NNT)₆₅ ((NNT)₆₅ disclosed as SEQ ID NO: 1) with BbsI and BamHI, it was possible to extend the length of the polymer using the same oligonucleotide multimerization strategy as before.

[0096] The oligonucleotides used to extend the (NNT)₆₅ polymer ((NNT)₆₅ disclosed as SEQ ID NO: 1) to (NNT)₁₅ ((NNT)₁₅₅ disclosed as SEQ ID NO: 2) are listed below:

### Polymer Backbone Oligonucleotides

(SEQ ID NO: 170)

| | |
|---|---|
| o3NNTextF: | 5′-CAACACCAATAATACCAACAATACAAA-3′ |

(SEQ ID NO: 171)

| | |
|---|---|
| o3NNTextR: | 5′-GTTGTTTGTATTGTTGGTATTATTGGT-3′ |

### Adaptor Oligonucleotides

| | | |
|---|---|---|
| oDent3F: | 5′-CAACTAGTCTTCG-3′ | (SEQ ID NO: 172) |
| oDent3R: | 5′-GATCCGAAGACTA-3′ | (SEQ ID NO: 173) |

[0099] As with the production of the PHO-G-CSF-(NNT)₆₅×pBSK Construct ((NNT)₆₅ disclosed as SEQ ID NO: 1), NTNNTNNTN (SEQ ID NO: 165) was the repeating unit of the NNT polymer extension that was produced using the polymer backbone oligonucleotides of o3NNTextF and o3NNTextR, in which the CAAC overhang and GTTG underhang were still used to multimerize the polymer and the amino acid composition was unchanged from the original (NNT)₆₅ polymer ((NNT)₆₅ disclosed as SEQ ID NO: 1).

(SEQ ID NO: 165)

N T N N T N N T N

(SEQ ID NO: 174)

| | |
|---|---|
| 5′-C AAC ACC AAT AAT ACC AAC AAT | (o3NNTextF) |
| ACA AA-3′ | |

(SEQ ID NO: 175)

| | |
|---|---|
| 3′-TGG TTA TTA TGG TTG TTA TGT TTG | (o3NNTextR) |
| TTG-5′ | |

[0100] The above underlined nucleotides of o3NNTextF and o3NNTextR differed from the nucleotides in the same position in o3NNTF and o3NNTR respectively.

[0101] The following is the terminating adaptor molecule that completed the (NNT)₁₅₅ polymer ((NNT)₁₅₅ disclosed as SEQ ID NO: 2) and included the BamHI site necessary for cloning. oDent3F and oDent3R are the same oligonucleotides that were used for the initial (NNT)₆₅ polymer ((NNT)₆₅ disclosed as SEQ ID NO: 1).

### Terminating Adaptor Molecule

| | | |
|---|---|---|
| N * | | |
| 5′-C AAC TAG TCT TCG-3′ | (oDent3F) | (SEQ ID NO: 176) |
| 3′-ATC AGA AGC CTA G-5′ | (oDent3R) | (SEQ ID NO: 177) |
| BbsI BamHI | | |

[0103] A diagram of the PHO-G-CSF-(NNT)₁₅₅×pBSK vector ((NNT)₁₅₅ disclosed as SEQ ID NO: 2) is shown in FIG. 4. The extension of the (NNT)₆₅ polymer ((NNT)₆₅ disclosed as SEQ ID NO: 1) by 90AA utilized the BbsI site (destroyed) that was located at the C-terminus of PHO-G-CSF-(NNT)₆₅×pBSK ((NNT)₆₅ disclosed as SEQ ID NO: 1) and BamHI. It was noted that the BbsI site was regenerated at the end of the (NNT)₁₅₅ ((NNT)₁₅₅ disclosed as SEQ ID NO: 2) polymer for future extension of length. This vector confers ampicillin resistance (bla) when grown in bacteria.

### Method Of Construction

[0104] Complementary pairs of polymer backbone oligonucleotides o3NNTextF and o3NNTextR, and adaptor oligonucleotides oDent3F and oDent3R were phosphorylated using T4 PNK. The T4 PNK was heat-inactivated and the oligonucleotide pairs were allowed to slowly anneal on ice. Polymer oligomerization was performed by mixing polymer and adaptor duplexes at 20:1 and 40:1 ratios with T4 Ligase. The T4 Ligase was heat-inactivated and the entire ligation reactions were digested with BamHI overnight. Both reactions were precipitated and ran on an acrylamide gel. Material between 250 bp to 800 bp was excised and gel purified. This material ligated into PHO-G-CSF-(NNT)₆₅×pBSK ((NNT)₆₅ disclosed as SEQ ID NO: 1) digested with BbsI and BamHI. Chemically competent Stb12 cells were transformed with the ligation products and grown on LB-ampicillin plates. Minipreps were performed to isolate DNA and diagnostic digests identified putative clones. Sequence analysis determined which of the putative clones were correct.

[0105] The longest clone isolated from this strategy was PHO-G-CSF-(NNT)₁₅₅×pBSK ((NNT)₁₅₅ disclosed as SEQ ID NO: 2).

### Example 2

### Transformation Of Host Cell And Expression of Chimeric DNA Molecule

[0106] 2.A. Production Of PHO-G-CSF-(NNT)₁₅₅×pCE2 Construct ((NNT)₁₅₅ disclosed as SEQ ID NO: 2).
Preparation Of Vector pCE2

[0107] The plasmid pCE2 was derived from the plasmid pREP7b, through the following manipulations. First, the 2000 bp EBNA coding region was deleted. Next, pBR322ori was replaced with pKS-ori. Then, the RSV promoter region was replaced by the CMV enhancer and the elongation factor-1a (EF-1a) promoter and intron.

[0108] The CMV enhancer was derived from a 380 bp XbaI-SphI fragment produced by the polymerase chain reaction (PCR) from pCEP4 (Invitrogen, San Diego, Calif.) using the following primers:

(SEQ ID NO: 178)
5′-GGCTCTAGAT ATTAATAGTA ATCAATTAC-3′;
and
(SEQ ID NO: 179)
5′-CCTCACGCAT GCACCATGGT AATAGC-3′.

[0109] The EF-1a promoter and intron (Uetsuki, et al., J. Biol. Chem. 264:5791-5798 (1989)) were derived from a 1200 bp SphI-Asp718I fragment produced by PCR from human genomic DNA using the following primers:

(SEQ ID NO: 180)
5′-GGTGCATGCG TGAGGCTCCG GTGC-3′;
and
(SEQ ID NO: 181)
5′-GTAGTTTTCACGGTACCTGAAATGGAAG-3′.

[0110] The two fragments were ligated into a XbaI/Asp718I digested vector derived from pREP7b to generate pCE2.

PHO-G-CSF-(NNT)₁₅₅×pCE2 Construct ((NNT)₁₅₅ disclosed as SEQ ID NO: 2)

[0111] In order to express PHO-G-CSF-(NNT)₁₅₅ ((NNT)₁₅₅ disclosed as SEQ ID NO: 2) in mammalian cells, it was necessary to move the construct into the vector pCE2. This vector contained the minimal promoter and the first intron for the human elongation factor-1-α flanked by the immediate-early CMV enhancer. The vector also contained the hygromycin B resistance marker for mammalian selection.

[0112] A diagram of the PHO-G-CSF-(NNT)₁₅₅×pCE2 vector ((NNT)₁₅₅ disclosed as SEQ ID NO: 2) is shown in FIG. 5. The promoter that drives expression in CHO cells is Pcmv/ef-1a. The vector was linearized for electroporation into CHO cells using SalI. This vector confers resistance to hygromycin B in mammalian cells and ampicillin resistance (b1a) when grown in bacteria.

### Method Of Construction

[0113] This construct was produced by isolating and gel purifying the 1100 bp NotI-BamHI fragment from PHO-G-CSF-(NNT)₁₅₅×pBSK ((NNT)₁₅₅ disclosed as SEQ ID NO: 2). This material was ligated into pCE2 that had been digested with NotI and BamHI. Chemically competent Stbl2 cells were transformed with the ligation products and grown on LB-ampicillin plates. Minipreps were performed to isolate DNA and diagnostic digests identified putative clones. Large-scale maxipreps were performed to isolate microgram quantities of the plasmid for CHO cell transformation.

### 2.B. Production Of Transfectant Cell Lines

[0114] In order to produce the polymers described above, mammalian cells were used as host cells for expression. In this instance, Chinese hamster ovary (CHO) cell lines were chosen. CHO cells are widely used in the pharmaceutical industry to express recombinant protein therapeutics including G-CSF and EPO. As described below, expression cultures of G-CSF-polymer constructs in CHO cells were established.

### Establishment Of Adherent Cultures

[0115] The PHO-G-CSF-(NNT)₁₅₅×pCE2 vector ((NNT)₁₅₅) disclosed as SEQ ID NO: 2) was linearized using the enzyme SalI. The digest was precipitated and re-suspended in 50 μL of TE. One (1) μg of this plasmid was used in an electroporation along with 5×10⁶ CHO cells. Adherent CHO cells were grown in Ham's Nutrient Mixture F-12 (F-12 Ham's media) containing 10% FBS. The cells were allowed to recover overnight, and the next day media containing 700 μg/mL of hygromycin B was added to begin selection of resistant cells. The media was changed every 2-3 days as needed over the course of 2-3 weeks. Bulk pools of resistant cells were isolated and passaged two additional times in the presence of hygromycin B.

[0116] To test these cells for the secretion of PHO-G-CSF-(NNT)₁₅₅ ((NNT)₁₅₅ disclosed as SEQ ID NO: 2) into the media, the cells were grown in Ham's media containing low serum media (0.5%) for 3-5 days. The media was isolated and used in Western blots that were probed using a polyclonal antibody against G-CSF. The blots are reproduced in FIGS. 6 and 7. The difference between the blots is that the samples in FIG. 7 were additionally subjected to Peptide:N Glycosidase F (PNGase F) treatment. As shown in FIG. 6, the blots showed immunoreactive material migrating at apparent molecular weight=95 kDa. As shown in FIG. 7, digestion of these same samples with PNGase F, a glycosidase that removes N-linked glycosylation chains, reduced the immunoreactive material to apparent molecular weight≈49 kDa. This corresponded approximately to the theoretical size of unmodified G-CSF-(NNT)₁₅₅ protein ((NNT)₁₅₅ disclosed as SEQ ID NO: 2). Native G-CSF migrates electrophoretically at ≈18 kDa; the addition of the NNT polymer to the C-terminus adds substantial mass to the recombinant, polymeric molecule. The expression also appeared quite stable; no appreciable proteolytic degradation was observed for the unpurified protein present in conditioned medium. Further, as shown in FIG. 7, the decrease in size of the constructs after PNGase F treatment suggested the recombinant protein constructs were subject to a substantial amount of glycosylation.

### Establishment Of Suspension Cultures

[0117] To facilitate purification of G-CSF-(NNT)₁₅₅ ((NNT)₁₅₅ disclosed as SEQ ID NO: 2) found in the conditioned media of established CHO cultures, cells were grown in a chemically defined, low protein, serum-free media (PROCHO4-CDM, Cambrex). In the process of adapting the cells to this media, the cells adapted from adherent to suspension growth.

[0118] Cells were grown in F-12 Ham's+10% FBS to near confluency in T-185 flasks, trypsinized and suspended in PROCHO4-CDM media. 107 cells were added to 50 mL of PROCHO4-CDM and incubated in T-185 flasks. After 4-5 passages, approximately 90% of the cells were no longer adherent and grew as a mixture of single cell and aggregated cell clumps. For conditioned media collections, typically 60 mL of fresh PROCHO4-CDM media was incubated with 7-8 mL of a high cell density culture for 5-6 days. Cells were removed from the media by centrifugation and the media was subsequently clarified using a 0.2 micron filter. The media was quantitated for yield of G-CSF-(NNT)₁₅₅ ((NNT)₁₅₅ disclosed as SEQ ID NO: 2) by western blot (typically 100-200 μg/L) and stored until needed.

### 2.C. Expression Of G-CSF-NNT Constructs In PROCHO4-CDM

[0119] Samples were conditioned media from the foregoing bulk CHO cell lines grown for 6 days in PROCHO4-CDM. Western blots were probed using polyclonal antibody against G-CSF. As shown in FIG. 8, the size of both constructs were the same as was seen in Ham's media (as described above) and there was no degradation observed in the G-CSF(NNT)₁₅₅ ((NNT)₁₅₅ disclosed as SEQ ID NO: 2) cell lines.

### 2.D. Optimization Of Expression

[0120] Various chemical and nutrient additives as well as various environmental parameters were tested in an attempt to determine growth conditions necessary to maximize expression of the desired product. The following approaches resulted in an increase in protein accumulation.

### Chemical Additives

[0121] Although it was known that not all chemical additives result in an increase in protein production, published literature indicated that the addition of adenosine or AMP to 2.5 mM leads to cell cycle arrest; effectively prolonging cell culture viability with a concomitant increase in protein accumulation. The effect of AMP was tested on CHO-mediated production of G-CSF-(NNT)₁₅₅ ((NNT)₁₅₅ disclosed as SEQ ID NO: 2) production in ProCHO4 chemically defined medium (CDM). AMP was added at a final concentration of 1 mM in ProCHO4 CDM. No decrease in cell viability compared to control was observed. The addition of AMP resulted in a slight increase in protein production.

### Environmental Parameters

### Temperature Changes

[0122] Reduced incubation temperatures for CHO cultures can lead to markedly enhanced levels of protein production. As was found with other protein production enhancement methods, the observed effect is due to enhanced protein production during cell cycle arrest. The effect of reducing the incubation temperature of the recombinant CHO line from 37° C. to 28° C. was examined. Although cultures maintained at 28° C. remained viable considerably longer than those at 37° C., the lower temperature did not result in higher recombinant protein production.

### Adaptation To Suspension Culture

[0123] The bulk CHO population was converted to spinner flask culture conditions. Adaptation to suspension culture was mediated by growth in ProCHO4 CDM. Following adaptation, cells were expanded in T-flasks and seeded into spinner flasks containing ProCHOS CDM at various densities. A marked increase in protein production was observed during adaptation to suspension culture in ProCHOS CDM, regardless of whether the cells were grown in static or spinner cultures.

### Use Of Different Cell Lines As Hosts

[0124] One approach to optimization of expression may be to use a new cell line for host cells. Accordingly, a new shipment of CHO-K1 from ATCC was obtained. The new population was propagated and banked at an early passage for future use. This defined culture was used to generate stable clonal cell lines expressing the recombinant protein of interest. Briefly, CHO-K1 cells were electroporated with the vector of interest and selected for stable expression of hygromycin. 92 colonies were isolated and evaluated for expression of the recombinant protein of interest. Many of these colonies exhibited expression levels that were markedly higher than that of the original transfected population, described above.

### Results

[0125] A very slight enhancement of expression was observed when cultures were treated with 1 mM AMP. Reduced culture temperatures increased the longevity of the cultures, but there was no enhancement of protein expression. Adaptation to suspension culture conditions in ProCHO5 CDM dramatically enhanced expression of the recombinant protein. Also, isolated clones from an ATCC-defined CHO-K1 cell line expressed the desired protein at significantly higher levels than the originally isolated population.

### Example 3

[0126] Pharmacokinetic Evaluation Of G-CSF-(NNT)₁₅₅ Conjugate ((NNT)₁₅₅ Disclosed as SEQ ID NO: 2)

[0127] The pharmacokinetic parameters of the G-CSF-(NNT)₁₅₅ protein conjugate ((NNT)₁₅₅ disclosed as SEQ ID NO: 2) was evaluated. Three other compounds were included as positive controls. The controls were Neulasta (PEG-G-CSF), Neupogen (rh-G-CSF) and G-CSF compounds. The compounds were tested by single intravenous (i.v.) administration to mice and blood was collected up to 72 hours post-dosing. The plasma was analyzed by the ELISA method.

### 3.A. Analytical Method

[0128] The assay employed the quantitative sandwich enzyme immunoassay technique. A monoclonal antibody specific for G-CSF had been pre-coated onto a microplate. Standards and samples were pipetted into the wells. Any G-CSF present was bound by the immobilized antibody. After washing away any unbound substances, an enzyme-linked polyclonal antibody specific for G-CSF was added to the wells. Following a wash to remove any unbound antibody-enzyme reagent, a substrate solution was added to the wells and color developed in proportion to the amount of G-CSF bound in the initial step. The color development was stopped and the intensity of the color was measured.

### Reagents

[0129] The following reagents and material were used:
[0130] G-CSF Microplate: 96 well polystyrene microplate (12 strips of 8 wells) coated with a murine monoclonal antibody against G-CSF.
[0131] G-CSF conjugate: 21 mL of polyclonal antibody against G-CSF conjugated to horseradish peroxidase, with preservative.
[0132] G-CSF standard: 2 vials (25 ng/mL) of recombinant human G-CSF in a buffered protein base with preservative, lyophilized.
[0133] Assay Diluent RD1A: 11 mL of a buffered protein base with preservative.
[0134] Calibrator Diluent RD5: 21 mL of a buffered protein base with preservative. For cell culture supernate samples.
[0135] Calibrator Diluent RD6A: 21 mL of animal serum with preservative. For serum/plasma samples.
[0136] Wash Buffer Concentrate: 21 mL of a 25-fold concentrated solution of buffered surfactant with preservative.
[0137] Color Reagent A: 12.5 mL of stabilized hydrogen peroxide.
[0138] Color Reagent B: 12.5 mL of stabilized chromogen (tetramethylbenzidine).
[0139] Stop Solution: 6 mL of 2N sulfuric acid.
[0140] Plate Covers: 4 adhesive strips.

### Reagent Preparation

[0141] 20 mL of Wash Buffer Concentrate was diluted into deionized or distilled water to prepare 500 mL of Wash Buffer. The G-CSF Standard was reconstituted with 1 mL deionized or distilled water. This reconstitution produced a stock solution of 25000 pg/mL. The G-CSF standard was allowed to sit for a minimum of 15 minutes with gentle agitation prior to making dilutions. Nine hundred (900) μL of Calibrator Diluent RD6A was pipetted into a 2500 pg/mL tube. 600 μL of the same diluent was pipetted into the remaining 4 tubes. The stock solution was used to produce a dilution series: 25000 pg/mL (1:10)→2500 pg/mL and 25000 pg/mL (1:3)→833.3 pg/mL (1:3)→277.8 pg/mL (1:3)→92.6 pg/mL (1:3)→30.9 pg/mL. Each tube was mixed thoroughly before the next transfer. The 2500 pg/mL standard served as the high standard. The Calibrator Diluent RD6A served as the zero standard (0 pg/mL). The standard curve was performed with 6 point: 2500-833.3-277.8-92.6-30.9-0 pg/mL, double well for each point. For the substrate solution, Color Reagent A and B was mixed together in equal volumes within 15 minutes of use. The reagents were protected from light.

### Assay Procedure

[0142] All reagents and samples were brought to room temperature before use. All reagents and working standards were prepared. One hundred (100) μL of Assay Diluent RD1A were added to each well, 100 μL of standard and an appropriate volume of sample were also added to each well. The wells were covered with an adhesive strip and incubated for 2 h at room temperature. Each well was aspirated and washed with 400 μL of wash buffer, which was repeated twice for a total of three washes. After the last wash, any remaining wash buffer was removed by aspirating or decanting. The plate was inverted and blotted against clean paper towels. 200 μL of G-CSF conjugate was added to each well. The wells were covered with a new adhesive strip. The wells were incubated for 2 h at room temperature. The aspiration/wash described above was repeated. Two hundred (200) μL of Substrate Solution was added to each well. The wells were incubated for 20 min. at room temperature. The wells were protected from light. Then, 50 μL of stop solution were added to each well. Finally, the optical density of each well within 30 min. was determined using a microplate reader (VersaMax-Molecular Device) set to 450 nm with correction to 570 nm (OD 450 nm-OD 570 nm).

### Pharmacokinetic Analysis

[0143] A non-compartmental pharmacokinetic analysis (WINNonLin software version 4.1) was applied. The following main parameters were observed or calculated for each GCSF construct: t_{f}, last time at which each compound concentration was measurable; λ_{z}, apparent terminal rate constant associated to the apparent terminal phase, estimated by linear regression analysis of the logarithm of the plasma concentrations versus time in the mono-exponential terminal part of the curve; t_{1/2,z}, apparent terminal half-life, calculated according to the following equation: t_{1/2,z}=ln(2)/λ_{z}; AUC, area under the plasma concentration-time curve from time zero to infinity; AUC/D, area under the plasma concentration-time curve per unit of dose; MRT, mean residence time calculated as the ratio between the area under the first moment curve, AUMC, and AUC; CL, systemic clearance, calculated as CL=D/AUC; and VS, steady state volume of distribution, calculated as Vₛₛ=CL*MRT.

### Results

[0144] As shown in Table 9, pharmacokinetic studies in mice showed that G-CSF-(NNT)₁₅5 ((NNT)₁₅₅ disclosed as SEQ ID NO: 2) possessed a longer half-life (6.2 h) than either the G-CSF Control (1.53 h), NEUPOGEN compound (1.13 h) or the NEULASTA compound (3.04 h). G-CSF-(NNT)₁₅₅'s ((NNT)₁₅₅ disclosed as SEQ ID NO: 2) longer half-life corresponded to a more sustained duration of effect compared to all three controls. A corresponding substantial decrease of systemic clearance was observed for G-CSF-(NNT)₁₅₅ ((NNT)₁₅₅ disclosed as SEQ ID NO: 2), accounting for the 9.5 mL/h/kg systemic clearance. Other conjugates containing amino acid extensions disclosed herein exhibited a decreased half-life relative to control.

### Example 4

### Bioavailability And Efficacy Of G-CSF-(NNT)₁₅₅ Conjugate ((NNT)₁₅₅ Disclosed as SEQ ID NO: 2).

[0145] Neutropenia, a low absolute count of neutrophils, is a serious condition that can impede the fight against infections. To stimulate a peripheral increase in neutrophil counts, granulocyte colony stimulating factor (G-CSF) may be used as a therapy for neutropenia or in combination with other stimulating factors in collection of cells for transplant. The bioavailability of partially purified G-CSF-(NNT)₁₅₅ ((NNT)₁₅₅ disclosed as SEQ ID NO: 2), PEG-G-CSF (NEULASTA) and rh-G-CSF (NEUPOGEN) was determined and compared via i.v. (intravenous) and s.c. (subcutaneous) administration. The NEUPOGEN compound is a recombinant methionyl human G-CSF. The NEULASTA compound is a covalent conjugate of recombinant methionyl human G-CSF and monomethoxypolyethylene glycol. As described above, G-CSF-(NNT)₁₅₅ ((NNT)₁₅₅ disclosed as SEQ ID NO: 2) is an amino acid lengthened and/or glycosylated form of G-CSF.

### 4.A. Testing For Bioavailability Through ELISA

[0146] To evaluate the bioavailability of G-CSF-(NNT)₁₅₅ ((NNT)₁₅₅ disclosed as SEQ ID NO: 2), an ELISA analysis was performed on plasma samples obtained from mice that were given doses of G-CSF-(NNT)₁₅₅ ((NNT)₁₅₅ disclosed as SEQ ID NO: 2), PEG-G-CSF and rh-G-CSF through i.v. and s.c. administration.

[0147] Test and control articles were as follows: partially purified G-CSF-(NNT)₁₅₅ ((NNT)₁₅₅ disclosed as SEQ ID NO: 2), PEG-G-CSF (NEULASTA), rh-G-CSF (NEUPOGEN) and the vehicle control (150 mM NaCl+20 mM NaOAc+0.004% Tween-20); each manufactured in a manner that was acceptable for use in animals via the designated routes of administration, i.v. and s.c.

[0148] Mice were given doses of G-CSF-(NNT)₁₅₅ ((NNT)₁₅₅ disclosed as SEQ ID NO: 2), PEG-G-CSF, rh-G-CSF (each in the amount of 125 μg/kg) and a vehicle control through i.v and s.c. administration. Mouse plasma samples were isolated. If required, the mouse plasma samples were diluted.

[0149] Then, the mouse samples were analyzed with G-CSF ELISA. The main purpose of analyzing the plasma samples via ELISA was for qualitative purposes only, and not for quantitative purposes (i.e., not to obtain extremely precise blood plasma level concentrations). The G-CSF ELISA results either provided a qualitative affirmation that the test article was present in the plasma or a qualitative repudiation that the test article was not in the plasma. The plasma samples were analyzed in triplicate, using two dilutions.

[0150] The results were that intravenously administered G-CSF-(NNT)₁₅₅ ((NNT)₁₅₅ disclosed as SEQ ID NO: 2) could be detected out to 72 hours, whereas PEG-G-CSF could only be detected out to 24 hours. In addition, both subcutaneously administered G-CSF-(NNT)₁₅₅ ((NNT)₁₅₅ disclosed as SEQ ID NO: 2) and PEG-G-CSF could be detected out to 72 hours. Subcutaneously administered rh-G-CSF could be detected at the 15-minute and 2-hour sampling time points.

4.B. A Single Dose Comparison of G-CSF-(NNT)₁₅₅ ((NNT)₁₅₅ disclosed as SEQ ID NO: 2) and PEG-G-CSF On The Hematopoietic Effects In Mice

[0151] In another evaluation of the bioavailability and efficacy of G-CSF-(NNT)₁₅₅ ((NNT)₁₅₅ disclosed as SEQ ID NO: 2), hematology analysis involving white blood cell and neutrophil count measurements was performed on plasma samples obtained from mice that were given doses of G-CSF-(NNT)₁₅₅ ((NNT)₁₅₅ disclosed as SEQ ID NO: 2), PEG-G-CSF and rh-G-CSF through i.v. and s.c. administration.

[0152] Test and control articles were the same as for the above G-CSF ELISA evaluation. The procedures for obtaining plasma samples were also the same as for the G-CSF ELISA evaluation. Hematology analysis results were as follows.

[0153] The white blood cell count mean data for the vehicle control ranged from 0.76×10³/μL to 4.35×10³/μL and 1.27×10³/μL to 4.25×10³/μL for the i.v. and s.c. administration, respectively. The mean absolute neutrophil count data for the vehicle control ranged from 0.11×10³/μL to 0.55×10³/μL and 0.29×10³/μL to 0.35×10³/μL for the for i.v. and s.c. administration, respectively.

[0154] The mean white blood cell count for G-CSF-(NNT)₁₅₅ ((NNT)₁₅₅ disclosed as SEQ ID NO: 2) increased from 1.44×10³/μL, 15 minutes post-dose to 11.45×10³/μL, 72 hours post i.v. administration. The mean white blood cell count for G-CSF-(NNT)₁₅₅ ((NNT)₁₅₅ disclosed as SEQ ID NO: 2) increased from 3.15×10³/μL, 15 minutes post-dose to 11.45×10³/μL, 72 hours post s.c. administration. Similarly, mean absolute neutrophil count data for G-CSF-(NNT)₁₅₅ ((NNT)₁₅₅ disclosed as SEQ ID NO: 2) increased from 0.04×10³/μL, 15 minutes post-dose to 4.24×10³/μL, 72 hours post i.v. administration. The mean absolute neutrophil count for G-CSF-(NNT)₁₅₅ ((NNT)₁₅₅ disclosed as SEQ ID NO: 2) increased from 0.25×10³/μL, at 15 minutes post-dose to 2.04×10³/μL, at 72 hours post administration and decreasing to 0.14×10³/μL for the s.c. route of administration at 120 hours post administration.

[0155] The mean white blood cell count for PEG-G-CSF (Neulasta) increased from 1.36×10³/μL, at 15 minutes post-dose to 6.03×10³/μL, at 24 hours post administration, and then decreased to 3.01×10³ μL, at 72 hour post i.v. administration. The mean white blood cell count for PEG-G-CSF (Neulasta) increased from 1.47×10³/μL, at 15 minutes post-dose to 4.58×10³/μL, at 24 hours post administration, and then decreased to 2.47×10³/μL, at 120 hours post s.c. administration. The mean absolute neutrophil count for PEG-G-CSF (Neulasta) increased from 0.05×10³/μL, at 15 minutes post-dose to 1.83×10³/μL, at 24 hours post administration, and then decreased to 0.20×10³/μL, at 72 hours post i.v. administration. The mean absolute neutrophil count for PEG-G-CSF (Neulasta) increased from 0.18×10³/μL, at 15 minutes post-dose to 1.04×10³/μL, at 24 hours post administration and then decreased to 0.22×10³/μL, 120 hours post s.c. administration.

[0156] The mean white blood cell count for rh-G-CSF (Neupogen) decreased from 1.30×10³/μL, at 15 minutes post-dose to 1.19×10³/μL at 2 hours post s.c. administration. The mean absolute neutrophil count for rh-G-CSF (Neupogen) increased from 0.11×10³/μL, at 15 minutes post-dose to 0.49×10³/μL at 2 hours post s.c. route of administration.

[0157] The result showed that intravenous administration of G-CSF-(NNT)₁₅₅ ((NNT)₁₅₅ disclosed as SEQ ID NO: 2) demonstrated a substantial increase in white blood cell counts, through 72 hours post-dose, which correlated directly to an increase in absolute neutrophil counts. This mean increase exceeded the white blood cell count of the vehicle control by approximately 260%. Similarly, a mean increase in the white blood cell count for the s.c. administration of G-CSF-(NNT)₁₅₅ ((NNT)₁₅₅ disclosed as SEQ ID NO: 2) exceeded that of both the vehicle control and PEG-G-CSF by approximately 295%, 72 hours post-dose. However, both the mean white blood cell count and the mean absolute neutrophil count returned to that of both the vehicle control and PEG-G-CSF at 120 hours post-dose.

[0158] In some embodiments, the peptide contains the sequence NNT, NNNNT (SEQ ID NO: 182) or NNNNNT (SEQ ID NO: 183), and n is an integer of about 150 to about 160. In some of these embodiments, the biologically active protein is G-CSF.

[0159] All publications cited in the specification are indicative of the level of skill of those skilled in the art to which this invention pertains. All these publications are herein incorporated by reference to the same extent as if each individual publication were specifically and individually indicated as being incorporated by reference.

[0160] Although the invention herein has been described with reference to particular embodiments, it is to be understood that these embodiments are merely illustrative of the principles and applications of the present invention. It is therefore to be understood that numerous modifications may be made to the illustrative embodiments and that other arrangements may be devised without departing from the spirit and scope of the present invention as defined by the appended claims.

TABLE 1

Peptide Motifs having N(Asn) as the Major Constituent
(SEQ ID NOS: 184-904, respectively, in order of appearance)

NNT, TNN, NTN, NNNT, TNNN, NTNN, NNTN, NNNNT, TNNNN, NTNNN,
NNTNN, NNNTN, NNNTT, TTNNN, TNTNN, TNNTN, TNNNT, NTTNN,
NTNTN, NTNNT, NNTTN, NNTNT, NNNNNT, TNNNNN, NTNNNN, NNTNNN,
NNNTNN, NNNNTN, NNNNTT, TTNNNN, TNTNNN, TNNTNN, TNNNTN,
TNNNNT, NTTNNN, NTNTNN, NTNNTN, NTNNNT, NNTTNN, NNTNTN,
NNTNNT, NNNTTN, NNNTNT, NNNNTTT, TTTNNNN, TNTTNNN, TNTNTNN,
TNTNNTN, TNTNNNT, TNNTTNN, TNNTNTN, TNNTNNT, TNNNTNT,
TNNNTTN, TNNNNTT, TTNTNNN, TTNNTNN, TTNNNTN, TTNNNNT,
NTTTNNN, NTTNTNN, NTTNNTN, NTTNNNT, NTNTTNN, NTNNTTN,
NTNNNTT, NTNTNTN, NTNTNNT, NTNNTNT, NNTTTNN, NNTTNTN,
NNTTNNT, NNTNTTN, NNTNTNT, NNTNNTT, NNNTTTN, NNNTTNT,
NNNTNTT, NNNNNTT, TTNNNNN, TNTNNNN, TNNTNNN, TNNNTNN,
TNNNNTN, TNNNNNT, NTTNNNN, NTNTNNN, NTNNTNN, NTNNNTN,
NTNNNNT, NNTTNNN, NNTNTNN, NNTNNTN, NNTNNNT, NNNTTNN,
NNNTNTN, NNNTNNT, NNNNTTN, NNNNTNT NNNNNNT, TNNNNNN,
NTNNNNN, NNTNNNN, NNNTNNN, NNNNTNN, NNNNNTN, NNA, ANN, NAN,
NNNA, ANNN, NANN, NNAN, NNNNA, ANNNN, NANNN, NNANN, NNNAN,
NNNAA, AANNN, ANANN, ANNAN, ANNNA, NAANN, NANAN, NANNA,
NNAAN, NNANA, NNNNNA, ANNNNN, NANNNN, NNANNN, NNNANN,
NNNNAN, NNNNAA, AANNNN, ANANNN, ANNANN, ANNNAN, ANNNNA,
NAANNN, NANANN, NANNAN, NANNNA, NNAANN, NNANAN, NNANNA,
NNNAAN, NNNANA, NNNNAAA, AAANNNN, ANAANNN, ANANANN, ANANNAN,
ANANNNA, ANNAANN, ANNANAN, ANNANNA, ANNNANA, ANNNAAN,
ANNNNAA, AANANNN, AANNANN, AANNNAN, AANNNNA, NAAANNN,
NAANANN, NAANNAN, NAANNNA, NANAANN, NANNAAN, NANNNAA,
NANANAN, NANANNA, NANNANA, NNAAANN, NNAANAN, NNAANNA,
NNANAAN, NNANANA, NNANNAA, NNNAAAN, NNNAANA, NNNANAA,
NNNNNAA, AANNNNN, ANANNNN, ANNANNN, ANNNANN, ANNNNAN,
ANNNNNA, NAANNNN, NANANNN, NANNANN, NANNNAN, NANNNNA,
NNAANNN, NNANANN, NNANNAN, NNANNNA, NNNAANN, NNNANAN,
NNNANNA, NNNNAAN, NNNNANA NNNNNNA, ANNNNNN, NANNNNN,
NNANNNN, NNNANNN, NNNNANN, NNNNNAN, NNS, SNN, NSN, NNNS,
SNNN, NSNN, NNSN, NNNNS, SNNNN, NSNNN, NNSNN, NNNSN, NNNSS,
SSNNN, SNSNN, SNNSN, SNNNS, NSSNN, NSNSN, NSNNS, NNSSN,
NNSNS, NNNNNS, SNNNNN, NSNNNN, NNSNNN, NNNSNN, NNNNSN,
NNNNSS, SSNNNN, SNSNNN, SNNSNN, SNNNSN, SNNNNS, NSSNNN,
NSNSNN, NSNNSN, NSNNNS, NNSSNN, NNSNSN, NNSNNS, NNNSSN,
NNNSNS, NNNNSSS, SSSNNNN, SNSSNNN, SNSNSNN, SNSNNSN,
SNSNNNS, SNNSSNN, SNNSNSN, SNNSNNS, SNNNSNS, SNNNSSN,
SNNNNSS, SSNSNNN, SSNNSNN, SSNNNSN, SSNNNNS, NSSSNNN,
NSSNSNN, NSSNNSN, NSSNNNS, NSNSSNN, NSNNSSN, NSNNNSS,
NSNSNSN, NSNSNNS, NSNNSNS, NNSSSNN, NNSSNSN, NNSSNNS,
NNSNSSN, NNSNSNS, NNSNNSS, NNNSSSN, NNNSSNS, NNNSNSS,
NNNNNSS, SSNNNNN, SNSNNNN, SNNSNNN, SNNNSNN, SNNNNSN,
SNNNNNS, NSSNNNN, NSNSNNN, NSNNSNN, NSNNNSN, NSNNNNS,
NNSSNNN, NNSNSNN, NNSNNSN, NNSNNNS, NNNSSNN, NNNSNSN,
NNNSNNS, NNNNSSN, NNNNSNS NNNNNNS, SNNNNNN, NSNNNNN,
NNSNNNN, NNNSNNN, NNNNSNN, NNNNNSN, NNQ, QNN, NQN, NNNQ,
QNNN, NQNN, NNQN, NNNNQ, QNNNN, NQNNN, NNQNN, NNNQN, NNNQQ,
QQNNN, QNQNN, QNNQN, QNNNQ, NQQNN, NQNQN, NQNNQ, NNQQN,
NNQNQ, NNNNNQ, QNNNNN, NQNNNN, NNQNNN, NNNQNN, NNNNQN,
NNNNQQ, QQNNNN, QNQNNN, QNNQNN, QNNNQN, QNNNNQ, NQQNNN,
NQNQNN, NQNNQN, NQNNNQ, NNQQNN, NNQNQN, NNQNNQ, NNNQQN,
NNNQNQ, NNNNQQQ, QQQNNNN, QNQQNNN, QNQNQNN, QNQNNQN,
QNQNNNQ, QNNQQNN, QNNQNQN, QNNQNNQ, QNNNQNQ, QNNNQQN,
QNNNNQQ, QQNQNNN, QQNNQNN, QQNNNQN, QQNNNNQ, NQQQNNN,
NQQNQNN, NQQNNQN, NQQNNNQ, NQNQQNN, NQNNQQN, NQNNNQQ,
NQNQNQN, NQNQNNQ, NQNNQNQ, NNQQQNN, NNQQNQN, NNQQNNQ,
NNQNQQN, NNQNQNQ, NNQNNQQ, NNNQQQN, NNNQQNQ, NNNQNQQ,
NNNNNQQ, QQNNNNN, QNQNNNN, QNNQNNN, QNNNQNN, QNNNNQN,
QNNNNNQ, NQQNNNN, NQNQNNN, NQNNQNN, NQNNNQN, NQNNNNQ,
NNQQNNN, NNQNQNN, NNQNNQN, NNQNNNQ, NNNQQNN, NNNQNQN,
NNNQNNQ, NNNNQQN, NNNNQNQ NNNNNNQ, QNNNNNN, NQNNNNN,
NNQNNNN, NNNQNNN, NNNNQNN, NNNNNQN, NNE, ENN, NEN, NNNE,
ENNN, NENN, NNEN, NNNNE, ENNNN, NENNN, NNENN, NNNEN, NNNEE,
EENNN, ENENN, ENNEN, ENNNE, NEENN, NENEN, NENNE, NNEEN,
NNENE, NNNNNE, ENNNNN, NENNNN, NNENNN, NNNENN, NNNNEN,
NNNNEE, EENNNN, ENENNN, ENNENN, ENNNEN, ENNNNE, NEENNN,
NENENN, NENNEN, NENNNE, NNEENN, NNENEN, NNENNE, NNNEEN,
NNNENE, NNNNEEE, EEENNNN, ENEENNN, ENENENN, ENENNEN,
ENENNNE, ENNEENN, ENNENEN, ENNENNE, ENNNENE, ENNNEEN,
ENNNNEE, EENENNN, EENNENN, EENNNEN, EENNNNE, NEEENNN,
NEENENN, NEENNEN, NEENNNE, NENEENN, NENNEEN, NENNNEE,
NENENEN, NENENNE, NENNENE, NNEEENN, NNEENEN, NNEENNE,
NNENEEN, NNENENE, NNENNEE, NNNEEEN, NNNEENE, NNNENEE,
NNNNNEE, EENNNNN, ENENNNN, ENNENNN, ENNNENN, ENNNNEN,
ENNNNNE, NEENNNN, NENENNN, NENNENN, NENNNEN, NENNNNE,
NNEENNN, NNENENN, NNENNEN, NNENNNE, NNNEENN, NNNENEN,
NNNENNE, NNNNEEN, NNNNENE NNNNNNE, ENNNNNN, NENNNNN,
NNENNNN, NNNENNN, NNNNENN, NNNNNEN, NNH, HNN, NHN, NNNH,
HNNN, NHNN, NNHN, NNNNH, HNNNN, NHNNN, NNHNN, NNNHN, NNNHH,
HHNNN, HNHNN, HNNHN, HNNNH, NHHNN, NHNHN, NHNNH, NNHHN,
NNHNH, NNNNNH, HNNNNN, NHNNNN, NNHNNN, NNNHNN, NNNNHN,
NNNNHH, HHNNNN, HNHNNN, HNNHNN, HNNNHN, HNNNNH, NHHNNN,
NHNHNN, NHNNHN, NHNNNH, NNHHNN, NNHNHN, NNHNNH, NNNHHN,
NNNHNH, NNNNHHH, HHHNNNN, HNHHNNN, HNHNHNN, HNHNNHN,
HNHNNNH, HNNHHNN, HNNHNHN, HNNHNNH, HNNNHNH, HNNNHHN,
HNNNNHH, HHNHNNN, HHNNHNN, HHNNNHN, HHNNNNH, NHHHNNN,
NHHNHNN, NHHNNHN, NHHNNNH, NHNHHNN, NHNNHHN, NHNNNHH,
NHNHNHN, NHNHNNH, NHNNHNH, NNHHHNN, NNHHNHN, NNHHNNH,
NNHNHHN, NNHNHNH, NNHNNHH, NNNHHHN, NNNHHNH, NNNHNHH,
NNNNNHH, HHNNNNN, HNHNNNN, HNNHNNN, HNNNHNN, HNNNNHN,
HNNNNNH, NHHNNNN, NHNHNNN, NHNNHNN, NHNNNHN, NHNNNNH,
NNHHNNN, NNHNHNN, NNHNNHN, NNHNNNH, NNNHHNN, NNNHNHN,
NNNHNNH, NNNNHHN, NNNNHNH NNNNNNH, HNNNNNN, NHNNNNN,
NNHNNNN, NNNHNNN, NNNNHNN, NNNNNHN, NND, DNN, NDN, NNND,
DNNN, NDNN, NNDN, NNNND, DNNNN, NDNNN, NNDNN, NNNDN, NNNDD,
DDNNN, DNDNN, DNNDN, DNNND, NDDNN, NDNDN, NDNND, NNDDN,
NNDND, NNNNND, DNNNNN, NDNNNN, NNDNNN, NNNDNN, NNNNDN,
NNNNDD, DDNNNN, DNDNNN, DNNDNN, DNNNDN, DNNNND, NDDNNN,
NDNDNN, NDNNDN, NDNNND, NNDDNN, NNDNDN, NNDNND, NNNDDN,
NNNDND, NNNNDDD, DDDNNNN, DNDDNNN, DNDNDNN, DNDNNDN,
DNDNNND, DNNDDNN, DNNDNDN, DNNDNND, DNNNDND, DNNNDDN,
DNNNNDD, DDNDNNN, DDNNDNN, DDNNNDN, DDNNNND, NDDDNNN,
NDDNDNN, NDDNNDN, NDDNNND, NDNDDNN, NDNNDDN, NDNNNDD,
NDNDNDN, NDNDNND, NDNNDND, NNDDDNN, NNDDNDN, NNDDNND,
NNDNDDN, NNDNDND, NNDNNDD, NNNDDDN, NNNDDND, NNNDNDD,
NNNNNDD, DDNNNNN, DNDNNNN, DNNDNNN, DNNNDNN, DNNNNDN,
DNNNNND, NDDNNNN, NDNDNNN, NDNNDNN, NDNNNDN, NDNNNND,
NNDDNNN, NNDNDNN, NNDNNDN, NNDNNND, NNNDDNN, NNNDNDN,
NNNDNND, NNNNDDN, NNNNDND NNNNNND, DNNNNNN, NDNNNNN,
NNDNNNN, NNNDNNN, NNNNDNN, and NNNNNDN.

TABLE 2

Peptide Motifs having G (Gly) as the Major Constituent
(SEQ ID NOS: 905-1728, respectively, in order of appearance)

GGT, TGG, GTG, GGGT, TGGG, GTGG, GGTG, GGGGT, TGGGG, GTGGG,
GGTGG, GGGTG, GGGTT, TTGGG, TGTGG, TGGTG, TGGGT, GTTGG,
GTGTG, GTGGT, GGTTG, GGTGT, GGGGGT, TGGGGG, GTGGGG, GGTGGG,
GGGTGG, GGGGTG, GGGGTT, TTGGGG, TGTGGG, TGGTGG, TGGGTG,
TGGGGT, GTTGGG, GTGTGG, GTGGTG, GTGGGT, GGTTGG, GGTGTG,
GGTGGT, GGGTTG, GGGTGT, GGGGTTT, TTTGGGG, TGTTGGG, TGTGTGG,
TGTGGTG, TGTGGGT, TGGTTGG, TGGTGTG, TGGTGGT, TGGGTGT,
TGGGTTG, TGGGGTT, TTGTGGG, TTGGTGG, TTGGGTG, TTGGGGT,
GTTTGGG, GTTGTGG, GTTGGTG, GTTGGGT, GTGTTGG, GTGGTTG,
GTGGGTT, GTGTGTG, GTGTGGT, GTGGTGT, GGTTTGG, GGTTGTG,
GGTTGGT, GGTGTTG, GGTGTGT, GGTGGTT, GGGTTTG, GGGTTGT,
GGGTGTT, GGGGGTT, TTGGGGG, TGTGGGG, TGGTGGG, TGGGTGG,
TGGGGTG, TGGGGGT, GTTGGGG, GTGTGGG, GTGGTGG, GTGGGTG,
GTGGGGT, GGTTGGG, GGTGTGG, GGTGGTG, GGTGGGT, GGGTTGG,
GGGTGTG, GGGTGGT, GGGGTTG, GGGGTGT GGGGGGT, TGGGGGG,
GTGGGGG, GGTGGGG, GGGTGGG, GGGGTGG, GGGGGTG, GGA, AGG, GAG,
GGGA, AGGG, GAGG, GGAG, GGGGA, AGGGG, GAGGG, GGAGG, GGGAG,
GGGAA, AAGGG, AGAGG, AGGAG, AGGGA, GAAGG, GAGAG, GAGGA,
GGAAG, GGAGA, GGGGGA, AGGGGG, GAGGGG, GGAGGG, GGGAGG,
GGGGAG, GGGGAA, AAGGGG, AGAGGG, AGGAGG, AGGGAG, AGGGGA,
GAAGGG, GAGAGG, GAGGAG, GAGGGA, GGAAGG, GGAGAG, GGAGGA,
GGGAAG, GGGAGA, GGGGAAA, AAAGGGG, AGAAGGG, AGAGAGG, AGAGGAG,
AGAGGGA, AGGAAGG, AGGAGAG, AGGAGGA, AGGGAGA, AGGGAAG,
AGGGGAA, AAGAGGG, AAGGAGG, AAGGGAG, AAGGGGA, GAAAGGG,
GAAGAGG, GAAGGAG, GAAGGGA, GAGAAGG, GAGGAAG, GAGGGAA,
GAGAGAG, GAGAGGA, GAGGAGA, GGAAAGG, GGAAGAG, GGAAGGA,
GGAGAAG, GGAGAGA, GGAGGAA, GGGAAAG, GGGAAGA, GGGAGAA,
GGGGGAA, AAGGGGG, AGAGGGG, AGGAGGG, AGGGAGG, AGGGGAG,
AGGGGGA, GAAGGGG, GAGAGGG, GAGGAGG, GAGGGAG, GAGGGGA,
GGAAGGG, GGAGAGG, GGAGGAG, GGAGGGA, GGGAAGG, GGGAGAG,
GGGAGGA, GGGGAAG, GGGGAGA GGGGGGA, AGGGGGG, GAGGGGG,
GGAGGGG, GGGAGGG, GGGGAGG, GGGGGAG, GGS, SGG, GSG, GGGS,
SGGG, GSGG, GGSG, GGGGS, SGGGG, GSGGG, GGSGG, GGGSG, GGGSS,
SSGGG, SGSGG, SGGSG, SGGGS, GSSGG, GSGSG, GSGGS, GGSSG,
GGSGS, GGGGGS, SGGGGG, GSGGGG, GGSGGG, GGGSGG, GGGGSG,
GGGGSS, SSGGGG, SGSGGG, SGGSGG, SGGGSG, SGGGGS, GSSGGG,
GSGSGG, GSGGSG, GSGGGS, GGSSGG, GGSGSG, GGSGGS, GGGSSG,
GGGSGS, GGGGSSS, SSSGGGG, SGSSGGG, SGSGSGG, SGSGGSG,
SGSGGGS, SGGSSGG, SGGSGSG, SGGSGGS, SGGGSGS, SGGGSSG,
SGGGGSS, SSGSGGG, SSGGSGG, SSGGGSG, SSGGGGS, GSSSGGG,
GSSGSGG, GSSGGSG, GSSGGGS, GSGSSGG, GSGGSSG, GSGGGSS,
GSGSGSG, GSGSGGS, GSGGSGS, GGSSSGG, GGSSGSG, GGSSGGS,
GGSGSSG, GGSGSGS, GGSGGSS, GGGSSSG, GGGSSGS, GGGSGSS,
GGGGGSS, SSGGGGG, SGSGGGG, SGGSGGG, SGGGSGG, SGGGGSG,
SGGGGGS, GSSGGGG, GSGSGGG, GSGGSGG, GSGGGSG, GSGGGGS,
GGSSGGG, GGSGSGG, GGSGGSG, GGSGGGS, GGGSSGG, GGGSGSG,
GGGSGGS, GGGGSSG, GGGGSGS, GGGGGGS, SGGGGGG, GSGGGGG,
GGSGGGG, GGGSGGG, GGGGSGG, GGGGGSG, GGQ, QGG, GQG, GGGQ,
QGGG, GQGG, GGQG, GGGGQ, QGGGG, GQGGG, GGQGG, GGGQG, GGGQQ,
QQGGG, QGQGG, QGGQG, QGGGQ, GQQGG, GQGQG, GQGGQ, GGQQG,
GGQGQ, GGGGGQ, QGGGGG, GQGGGG, GGQGGG, GGGQGG, GGGGQG,
GGGGQQ, QQGGGG, QGQGGG, QGGQGG, QGGGQG, QGGGGQ, GQQGGG,
GQGQGG, GQGGQG, GQGGGQ, GGQQGG, GGQGQG, GGQGGQ, GGGQQG,
GGGQGQ, GGGGQQQ, QQQGGGG, QGQQGGG, QGQGQGG, QGQGGQG,
QGQGGGQ, QGGQQGG, QGGQGQG, QGGQGGQ, QGGGQGQ, QGGGQQG,
QGGGGQQ, QQGQGGG, QQGGQGG, QQGGGQG, QQGGGGQ, GQQQGGG,
GQQGQGG, GQQGGQG, GQQGGGQ, GQGQQGG, GQGGQQG, GQGGGQQ,
GQGQGQG, GQGQGGQ, GQGGQGQ, GGQQQGG, GGQQGQG, GGQQGGQ,
GGQGQQG, GGQGQGQ, GGQGGQQ, GGGQQQG, GGGQQGQ, GGGQGQQ,
GGGGGQQ, QQGGGGG, QGQGGGG, QGGQGGG, QGGGQGG, QGGGGQG,
QGGGGGQ, GQQGGGG, GQGQGGG, GQGGQGG, GQGGGQG, GQGGGGQ,
GGQQGGG, GGQGQGG, GGQGGQG, GGQGGGQ, GGGQQGG, GGGQGQG,
GGGQGGQ, GGGGQQG, GGGGQGQ GGGGGGQ, QGGGGGG, GQGGGGG,
GGQGGGG, GGGQGGG, GGGGQGG, GGGGGQG, GGE, EGG, GEG, GGGE,
EGGG, GEGG, GGEG, GGGGE, EGGGG, GEGGG, GGEGG, GGGEG, GGGEE,
EEGGG, EGEGG, EGGEG, EGGGE, GEEGG, GEGEG, GEGGE, GGEEG,
GGEGE, GGGGGE, EGGGGG, GEGGGG, GGEGGG, GGGEGG, GGGGEG,
GGGGEE, EEGGGG, EGEGGG, EGGEGG, EGGGEG, EGGGGE, GEEGGG,
GEGEGG, GEGGEG, GEGGGE, GGEEGG, GGEGEG, GGEGGE, GGGEEG,
GGGEGE, GGGGEEE, EEEGGGG, EGEEGGG, EGEGEGG, EGEGGEG,
EGEGGGE, EGGEEGG, EGGEGEG, EGGEGGE, EGGGEGE, EGGGEEG,
EGGGGEE, EEGEGGG, EEGGEGG, EEGGGEG, EEGGGGE, GEEEGGG,
GEEGEGG, GEEGGEG, GEEGGGE, GEGEEGG, GEGGEEG, GEGGGEE,
GEGEGEG, GEGEGGE, GEGGEGE, GGEEEGG, GGEEGEG, GGEEGGE,
GGEGEEG, GGEGEGE, GGEGGEE, GGGEEEG, GGGEEGE, GGGEGEE,
GGGGGEE, EEGGGGG, EGEGGGG, EGGEGGG, EGGGEGG, EGGGGEG,
EGGGGGE, GEEGGGG, GEGEGGG, GEGGEGG, GEGGGEG, GEGGGGE,
GGEEGGG, GGEGEGG, GGEGGEG, GGEGGGE, GGGEEGG, GGGEGEG,
GGGEGGE, GGGGEEG, GGGGEGE GGGGGGE, EGGGGGG, GEGGGGG,
GGEGGGG, GGGEGGG, GGGGEGG, GGGGGEG, GGH, HGG, GHG, GGGH,
HGGG, GHGG, GGHG, GGGGH, HGGGG, GHGGG, GGHGG, GGGHG, GGGHH,
HHGGG, HGHGG, HGGHG, HGGGH, GHHGG, GHGHG, GHGGH, GGHHG,
GGHGH, GGGGGH, HGGGGG, GHGGGG, GGHGGG, GGGHGG, GGGGHG,
GGGGHH, HHGGGG, HGHGGG, HGGHGG, HGGGHG, HGGGGH, GHHGGG,
GHGHGG, GHGGHG, GHGGGH, GGHHGG, GGHGHG, GGHGGH, GGGHHG,
GGGHGH, GGGGHHH, HHHGGGG, HGHHGGG, HGHGHGG, HGHGGHG,
HGHGGGH, HGGHHGG, HGGHGHG, HGGHGGH, HGGGHGH, HGGGHHG,
HGGGGHH, HHGHGGG, HHGGHGG, HHGGGHG, HHGGGGH, GHHHGGG,
GHHGHGG, GHHGGHG, GHHGGGH, GHGHHGG, GHGGHHG, GHGGGHH,
GHGHGHG, GHGHGGH, GHGGHGH, GGHHHGG, GGHHGHG, GGHHGGH,
GGHGHHG, GGHGHGH, GGHGGHH, GGGHHHG, GGGHHGH, GGGHGHH,
GGGGGHH, HHGGGGG, HGHGGGG, HGGHGGG, HGGGHGG, HGGGGHG,
HGGGGGH, GHHGGGG, GHGHGGG, GHGGHGG, GHGGGHG, GHGGGGH,
GGHHGGG, GGHGHGG, GGHGGHG, GGHGGGH, GGGHHGG, GGGHGHG,
GGGHGGH, GGGGHHG, GGGGHGH GGGGGGH, HGGGGGG, GHGGGGG,
GGHGGGG, GGGHGGG, GGGGHGG, GGGGGHG, GGN, NGG, GNG, GGGN,
NGGG, GNGG, GGNG, GGGGN, NGGGG, GNGGG, GGNGG, GGGNG, GGGNN,
NNGGG, NGNGG, NGGNG, NGGGN, GNNGG, GNGNG, GNGGN, GGNNG,
GGNGN, GGGGGN, NGGGGG, GNGGGG, GGNGGG, GGGNGG, GGGGNG,
GGGGNN, NNGGGG, NGNGGG, NGGNGG, NGGGNG, NGGGGN, GNNGGG,
GNGNGG, GNGGNG, GNGGGN, GGNNGG, GGNGNG, GGNGGN, GGGNNG,
GGGNGN, GGGGNNN, NNNGGGG, NGNNGGG, NGNGNGG, NGNGGNG,
NGNGGGN, NGGNNGG, NGGNGNG, NGGNGGN, NGGGNGN, NGGGNNG,
NGGGGNN, NNGNGGG, NNGGNGG, NNGGGNG, NNGGGGN, GNNNGGG,
GNNGNGG, GNNGGNG, GNNGGGN, GNGNNGG, GNGGNNG, GNGGGNN,
GNGNGNG, GNGNGGN, GNGGNGN, GGNNNGG, GGNNGNG, GGNNGGN,
GGNGNNG, GGNGNGN, GGNGGNN, GGGNNNG, GGGNNGN, GGGNGNN,
GGGGGNN, NNGGGGG, NGNGGGG, NGGNGGG, NGGGNGG, NGGGGNG,
NGGGGGN, GNNGGGG, GNGNGGG, GNGGNGG, GNGGGNG, GNGGGGN,
GGNNGGG, GGNGNGG, GGNGGNG, GGNGGGN, GGGNNGG, GGGNGNG,
GGGNGGN, GGGGNNG, GGGGNGN GGGGGGN, NGGGGGG, GNGGGGG,
GGNGGGG, GGGNGGG, GGGGNGG, GGGGGNG, GGD, DGG, GDG, GGGD,
DGGG, GDGG, GGDG, GGGGD, DGGGG, GDGGG, GGDGG, GGGDG, GGGDD,
DDGGG, DGDGG, DGGDG, DGGGD, GDDGG, GDGDG, GDGGD, GGDDG,
GGDGD, GGGGGD, DGGGGG, GDGGGG, GGDGGG, GGGDGG, GGGGDG,
GGGGDD, DDGGGG, DGDGGG, DGGDGG, DGGGDG, DGGGGD, GDDGGG,
GDGDGG, GDGGDG, GDGGGD, GGDDGG, GGDGDG, GGDGGD, GGGDDG,
GGGDGD, GGGGDDD, DDDGGGG, DGDDGGG, DGDGDGG, DGDGGDG,
DGDGGGD, DGGDDGG, DGGDGDG, DGGDGGD, DGGGDGD, DGGGDDG,
DGGGGDD, DDGDGGG, DDGGDGG, DDGGGDG, DDGGGGD, GDDDGGG,
GDDGDGG, GDDGGDG, GDDGGGD, GDGDDGG, GDGGDDG, GDGGGDD,
GDGDGDG, GDGDGGD, GDGGDGD, GGDDDGG, GGDDGDG, GGDDGGD,
GGDGDDG, GGDGDGD, GGDGGDD, GGGDDDG, GGGDDGD, GGGDGDD,
GGGGGDD, DDGGGGG, DGDGGGG, DGGDGGG, DGGGDGG, DGGGGDG,
DGGGGGD, GDDGGGG, GDGDGGG, GDGGDGG, GDGGGDG, GDGGGGD,
GGDDGGG, GGDGDGG, GGDGGDG, GGDGGGD, GGGDDGG, GGGDGDG,
GGGDGGD, GGGGDDG, GGGGDGD GGGGGGD, DGGGGGG, GDGGGGG,
GGDGGGG, GGGDGGG, GGGGDGG, and GGGGGDG.

TABLE 3

Peptide Motifs having Q (Gln) as the Major Constituent
(SEQ ID NOS: 1729-2449, respectively, in order of
appearance)

QQT, TQQ, QTQ, QQQT, TQQQ, QTQQ, QQTQ, QQQQT, TQQQQ, QTQQQ,
QQTQQ, QQQTQ, QQQTT, TTQQQ, TQTQQ, TQQTQ, TQQQT, QTTQQ,
QTQTQ, QTQQT, QQTTQ, QQTQT, QQQQQT, TQQQQQ, QTQQQQ, QQTQQQ,
QQQTQQ, QQQQTQ, QQQQTT, TTQQQQ, TQTQQQ, TQQTQQ, TQQQTQ,
TQQQQT, QTTQQQ, QTQTQQ, QTQQTQ, QTQQQT, QQTTQQ, QQTQTQ,
QQTQQT, QQQTTQ, QQQTQT, QQQQTTT, TTTQQQQ, TQTTQQQ, TQTQTQQ,
TQTQQTQ, TQTQQQT, TQQTTQQ, TQQTQTQ, TQQTQQT, TQQQTQT,
TQQQTTQ, TQQQQTT, TTQTQQQ, TTQQTQQ, TTQQQTQ, TTQQQQT,
QTTTQQQ, QTTQTQQ, QTTQQTQ, QTTQQQT, QTQTTQQ, QTQQTTQ,
QTQQQTT, QTQTQTQ, QTQTQQT, QTQQTQT, QQTTTQQ, QQTTQTQ,
QQTTQQT, QQTQTTQ, QQTQTQT, QQTQQTT, QQQTTTQ, QQQTTQT,
QQQTQTT, QQQQQTT, TTQQQQQ, TQTQQQQ, TQQTQQQ, TQQQTQQ,
TQQQQTQ, TQQQQQT, QTTQQQQ, QTQTQQQ, QTQQTQQ, QTQQQTQ,
QTQQQQT, QQTTQQQ, QQTQTQQ, QQTQQTQ, QQTQQQT, QQQTTQQ,
QQQTQTQ, QQQTQQT, QQQQTTQ, QQQQTQT QQQQQQT, TQQQQQQ,
QTQQQQQ, QQTQQQQ, QQQTQQQ, QQQQTQQ, QQQQQTQ, QQA, AQQ, QAQ,
QQQA, AQQQ, QAQQ, QQAQ, QQQQA, AQQQQ, QAQQQ, QQAQQ, QQQAQ,
QQQAA, AAQQQ, AQAQQ, AQQAQ, AQQQA, QAAQQ, QAQAQ, QAQQA,
QQAAQ, QQAQA, QQQQQA, AQQQQQ, QAQQQQ, QQAQQQ, QQQAQQ,
QQQQAQ, QQQQAA, AAQQQQ, AQAQQQ, AQQAQQ, AQQQAQ, AQQQQA,
QAAQQQ, QAQAQQ, QAQQAQ, QAQQQA, QQAAQQ, QQAQAQ, QQAQQA,
QQQAAQ, QQQAQA, QQQQAAA, AAAQQQQ, AQAAQQQ, AQAQAQQ, AQAQQAQ,
AQAQQQA, AQQAAQQ, AQQAQAQ, AQQAQQA, AQQQAQA, AQQQAAQ,
AQQQQAA, AAQAQQQ, AAQQAQQ, AAQQQAQ, AAQQQQA, QAAAQQQ,
QAAQAQQ, QAAQQAQ, QAAQQQA, QAQAAQQ, QAQQAAQ, QAQQQAA,
QAQAQAQ, QAQAQQA, QAQQAQA, QQAAAQQ, QQAAQAQ, QQAAQQA,
QQAQAAQ, QQAQAQA, QQAQQAA, QQQAAAQ, QQQAAQA, QQQAQAA,
QQQQQAA, AAQQQQQ, AQAQQQQ, AQQAQQQ, AQQQAQQ, AQQQQAQ,
AQQQQQA, QAAQQQQ, QAQAQQQ, QAQQAQQ, QAQQQAQ, QAQQQQA,
QQAAQQQ, QQAQAQQ, QQAQQAQ, QQAQQQA, QQQAAQQ, QQQAQAQ,
QQQAQQA, QQQQAAQ, QQQQAQA QQQQQQA, AQQQQQQ, QAQQQQQ,
QQAQQQQ, QQQAQQQ, QQQQAQQ, QQQQQAQ, QQS, SQQ, QSQ, QQQS,
SQQQ, QSQQ, QQSQ, QQQQS, SQQQQ, QSQQQ, QQSQQ, QQQSQ, QQQSS,
SSQQQ, SQSQQ, SQQSQ, SQQQS, QSSQQ, QSQSQ, QSQQS, QQSSQ,
QQSQS, QQQQQS, SQQQQQ, QSQQQQ, QQSQQQ, QQQSQQ, QQQQSQ,
QQQQSS, SSQQQQ, SQSQQQ, SQQSQQ, SQQQSQ, SQQQQS, QSSQQQ,
QSQSQQ, QSQQSQ, QSQQQS, QQSSQQ, QQSQSQ, QQSQQS, QQQSSQ,
QQQSQS, QQQQSSS, SSSQQQQ, SQSSQQQ, SQSQSQQ, SQSQQSQ,
SQSQQQS, SQQSSQQ, SQQSQSQ, SQQSQQS, SQQQSQS, SQQQSSQ,
SQQQQSS, SSQSQQQ, SSQQSQQ, SSQQQSQ, SSQQQQS, QSSSQQQ,
QSSQSQQ, QSSQQSQ, QSSQQQS, QSQSSQQ, QSQQSSQ, QSQQQSS,
QSQSQSQ, QSQSQQS, QSQQSQS, QQSSSQQ, QQSSQSQ, QQSSQQS,
QQSQSSQ, QQSQSQS, QQSQQSS, QQQSSSQ, QQQSSQS, QQQSQSS,
QQQQQSS, SSQQQQQ, SQSQQQQ, SQQSQQQ, SQQQSQQ, SQQQQSQ,
SQQQQQS, QSSQQQQ, QSQSQQQ, QSQQSQQ, QSQQQSQ, QSQQQQS,
QQSSQQQ, QQSQSQQ, QQSQQSQ, QQSQQQS, QQQSSQQ, QQQSQSQ,
QQQSQQS, QQQQSSQ, QQQQSQS QQQQQQS, SQQQQQQ, QSQQQQQ,
QQSQQQQ, QQQSQQQ, QQQQSQQ, QQQQQSQ, QQE, EQQ, QEQ, QQQE,
EQQQ, QEQQ, QQEQ, QQQQE, EQQQQ, QEQQQ, QQEQQ, QQQEQ, QQQEE,
EEQQQ, EQEQQ, EQQEQ, EQQQE, QEEQQ, QEQEQ, QEQQE, QQEEQ,
QQEQE, QQQQQE, EQQQQQ, QEQQQQ, QQEQQQ, QQQEQQ, QQQQEQ,
QQQQEE, EEQQQQ, EQEQQQ, EQQEQQ, EQQQEQ, EQQQQE, QEEQQQ,
QEQEQQ, QEQQEQ, QEQQQE, QQEEQQ, QQEQEQ, QQEQQE, QQQEEQ,
QQQEQE, QQQQEEE, EEEQQQQ, EQEEQQQ, EQEQEQQ, EQEQQEQ,
EQEQQQE, EQQEEQQ, EQQEQEQ, EQQEQQE, EQQQEQE, EQQQEEQ,
EQQQQEE, EEQEQQQ, EEQQEQQ, EEQQQEQ, EEQQQQE, QEEEQQQ,
QEEQEQQ, QEEQQEQ, QEEQQQE, QEQEEQQ, QEQQEEQ, QEQQQEE,
QEQEQEQ, QEQEQQE, QEQQEQE, QQEEEQQ, QQEEQEQ, QQEEQQE,
QQEQEEQ, QQEQEQE, QQEQQEE, QQQEEEQ, QQQEEQE, QQQEQEE,
QQQQQEE, EEQQQQQ, EQEQQQQ, EQQEQQQ, EQQQEQQ, EQQQQEQ,
EQQQQQE, QEEQQQQ, QEQEQQQ, QEQQEQQ, QEQQQEQ, QEQQQQE,
QQEEQQQ, QQEQEQQ, QQEQQEQ, QQEQQQE, QQQEEQQ, QQQEQEQ,
QQQEQQE, QQQQEEQ, QQQQEQE QQQQQQE, EQQQQQQ, QEQQQQQ,
QQEQQQQ, QQQEQQQ, QQQQEQQ, QQQQQEQ, QQH, HQQ, QHQ, QQQH,
HQQQ, QHQQ, QQHQ, QQQQH, HQQQQ, QHQQQ, QQHQQ, QQQHQ, QQQHH,
HHQQQ, HQHQQ, HQQHQ, HQQQH, QHHQQ, QHQHQ, QHQQH, QQHHQ,
QQHQH, QQQQQH, HQQQQQ, QHQQQQ, QQHQQQ, QQQHQQ, QQQQHQ,
QQQQHH, HHQQQQ, HQHQQQ, HQQHQQ, HQQQHQ, HQQQQH, QHHQQQ,
QHQHQQ, QHQQHQ, QHQQQH, QQHHQQ, QQHQHQ, QQHQQH, QQQHHQ,
QQQHQH, QQQQHHH, HHHQQQQ, HQHHQQQ, HQHQHQQ, HQHQQHQ,
HQHQQQH, HQQHHQQ, HQQHQHQ, HQQHQQH, HQQQHQH, HQQQHHQ,
HQQQQHH, HHQHQQQ, HHQQHQQ, HHQQQHQ, HHQQQQH, QHHHQQQ,
QHHQHQQ, QHHQQHQ, QHHQQQH, QHQHHQQ, QHQQHHQ, QHQQQHH,
QHQHQHQ, QHQHQQH, QHQQHQH, QQHHHQQ, QQHHQHQ, QQHHQQH,
QQHQHHQ, QQHQHQH, QQHQQHH, QQQHHHQ, QQQHHQH, QQQHQHH,
QQQQQHH, HHQQQQQ, HQHQQQQ, HQQHQQQ, HQQQHQQ, HQQQQHQ,
HQQQQQH, QHHQQQQ, QHQHQQQ, QHQQHQQ, QHQQQHQ, QHQQQQH,
QQHHQQQ, QQHQHQQ, QQHQQHQ, QQHQQQH, QQQHHQQ, QQQHQHQ,
QQQHQQH, QQQQHHQ, QQQQHQH QQQQQQH, HQQQQQQ, QHQQQQQ,
QQHQQQQ, QQQHQQQ, QQQQHQQ, QQQQQHQ, QQN, NQQ, QNQ, QQQN,
NQQQ, QNQQ, QQNQ, QQQQN, NQQQQ, QNQQQ, QQNQQ, QQQNQ, QQQNN,
NNQQQ, NQNQQ, NQQNQ, NQQQN, QNNQQ, QNQNQ, QNQQN, QQNNQ,
QQNQN, QQQQQN, NQQQQQ, QNQQQQ, QQNQQQ, QQQNQQ, QQQQNQ,
QQQQNN, NNQQQQ, NQNQQQ, NQQNQQ, NQQQNQ, NQQQQN, QNNQQQ,
QNQNQQ, QNQQNQ, QNQQQN, QQNNQQ, QQNQNQ, QQNQQN, QQQNNQ,
QQQNQN, QQQQNNN, NNNQQQQ, NQNNQQQ, NQNQNQQ, NQNQQNQ,
NQNQQQN, NQQNNQQ, NQQNQNQ, NQQNQQN, NQQQNQN, NQQQNNQ,
NQQQQNN, NNQNQQQ, NNQQNQQ, NNQQQNQ, NNQQQQN, QNNNQQQ,
QNNQNQQ, QNNQQNQ, QNNQQQN, QNQNNQQ, QNQQNNQ, QNQQQNN,
QNQNQNQ, QNQNQQN, QNQQNQN, QQNNNQQ, QQNNQNQ, QQNNQQN,
QQNQNNQ, QQNQNQN, QQNQQNN, QQQNNNQ, QQQNNQN, QQQNQNN,
QQQQQNN, NNQQQQQ, NQNQQQQ, NQQNQQQ, NQQQNQQ, NQQQQNQ,
NQQQQQN, QNNQQQQ, QNQNQQQ, QNQQNQQ, QNQQQNQ, QNQQQQN,
QQNNQQQ, QQNQNQQ, QQNQQNQ, QQNQQQN, QQQNNQQ, QQQNQNQ,
QQQNQQN, QQQQNNQ, QQQQNQN QQQQQQN, NQQQQQQ, QNQQQQQ,
QQNQQQQ, QQQNQQQ, QQQQNQQ, QQQQQNQ, QQD, DQQ, QDQ, QQQD,
DQQQ, QDQQ, QQDQ, QQQQD, DQQQQ, QDQQQ, QQDQQ, QQQDQ, QQQDD,
DDQQQ, DQDQQ, DQQDQ, DQQQD, QDDQQ, QDQDQ, QDQQD, QQDDQ,
QQDQD, QQQQQD, DQQQQQ, QDQQQQ, QQDQQQ, QQQDQQ, QQQQDQ,
QQQQDD, DDQQQQ, DQDQQQ, DQQDQQ, DQQQDQ, DQQQQD, QDDQQQ,
QDQDQQ, QDQQDQ, QDQQQD, QQDDQQ, QQDQDQ, QQDQQD, QQQDDQ,
QQQDQD, QQQQDDD, DDDQQQQ, DQDDQQQ, DQDQDQQ, DQDQQDQ,
DQDQQQD, DQQDDQQ, DQQDQDQ, DQQDQQD, DQQQDQD, DQQQDDQ,
DQQQQDD, DDQDQQQ, DDQQDQQ, DDQQQDQ, DDQQQQD, QDDDQQQ,
QDDQDQQ, QDDQQDQ, QDDQQQD, QDQDDQQ, QDQQDDQ, QDQQQDD,
QDQDQDQ, QDQDQQD, QDQQDQD, QQDDDQQ, QQDDQDQ, QQDDQQD,
QQDQDDQ, QQDQDQD, QQDQQDD, QQQDDDQ, QQQDDQD, QQQDQDD,
QQQQQDD, DDQQQQQ, DQDQQQQ, DQQDQQQ, DQQQDQQ, DQQQQDQ,
DQQQQQD, QDDQQQQ, QDQDQQQ, QDQQDQQ, QDQQQDQ, QDQQQQD,
QQDDQQQ, QQDQDQQ, QQDQQDQ, QQDQQQD, QQQDDQQ, QQQDQDQ,
QQQDQQD, QQQQDDQ, QQQQDQD QQQQQQD, DQQQQQQ, QDQQQQQ,
QQDQQQQ, QQQDQQQ, QQQQDQQ, and QQQQQDQ.

TABLE 4

(SEQ ID NO: 2450)

| | | | | | |
|---|---|---|---|---|---|
| 10 | 20 | 30 | 40 | 50 | 60 |
| MFLQNLFLGF | LAVVCANATP | LGPASSLPQS | FLLKCLEQVR | KIQGDGAALQ | EKLCATYKLC |
| 70 | 60 | 90 | 100 | 110 | 120 |
| HPEELVLLGH | SLGIPWAPLS | SCPSQALQLA | GCLSQLHSGL | FLYQGLLQAL | EGISPELGPT |
| 130 | 140 | 150 | 160 | 170 | 180 |
| LDTLQLDVAD | FATTIWQQME | ELGMAPALQP | TQGAMPAFAS | AFQRRAGGVL | VASHLQSFLE |
| 190 | 200 | 210 | 220 | 230 | 240 |
| VSYRVLRHLA | QPNNTNNTNN | TNNTNNTNNT | NNTNNTNNTN | NTNNTNNTNN | TNNTNNTNNT |
| 250 | 260 | 270 | 280 | 290 | 300 |
| NNTNNTNNTN | NTNNTNNTNN | TNNTNNTNNT | NNTNNTNNTN | NTNNTNNTNN | TNNTNNTNNT |
| 310 | 320 | 330 | 340 | 350 | 360 |
| NNTNNTNNTN | NTNNTNNTNN | TNNTNNTNNT | NNTNNTNNTN | NTNNTNN*\|.. | .......... |

(SEQ ID NO: 2451)

| | | | | | |
|---|---|---|---|---|---|
| 10 | 20 | 30 | 40 | 50 | 60 |
| atgttcttgc | aaaatttatt | ccttggcttt | ttggccgttg | tttgcgcaaa | cgcgACTCCG |
| 70 | 80 | 90 | 100 | 110 | 120 |
| CTGGGTCCAG | CTAGCTCCCT | GCCCCAGAGC | TTCCTGCTCA | AGTGCTTAGA | GCAAGTGAGG |
| 130 | 140 | 150 | 160 | 170 | 180 |
| AAGATCCAGG | GCGATGGCGC | AGCGCTCCAG | GAGAAGCTGT | GTGCCACCTA | CAAGCTGTGC |
| 190 | 200 | 210 | 220 | 230 | 240 |
| CACCCCGAGG | AGCTGGTGCT | GCTCGGACAC | TCTCTGGGCA | TCCCCTGGGC | TCCCCTGAGC |
| 250 | 260 | 270 | 280 | 290 | 300 |
| AGCTGCCCCA | GCCAGGCCCT | GCAGCTGGCA | GGCTGCTTGA | GCCAACTCCA | TAGCGGCCTT |
| 310 | 320 | 330 | 340 | 350 | 360 |
| TTCCTCTACC | AGGGGCTCCT | GCAGGCCCTG | GAAGGGATCT | CCCCCGAGTT | GGGTCCCACC |
| 370 | 380 | 390 | 400 | 410 | 420 |
| TTGGACACAC | TGCAGCTGGA | CGTCGCCGAC | TTTGCCACCA | CCATCTGGCA | GCAGATGGAA |
| 430 | 440 | 450 | 460 | 470 | 480 |
| GAACTGGGAA | TGGCCCCTGC | CCTGCAGCCG | ACCCAGGGTG | CCATGCCGGC | CTTCGCCTCT |
| 490 | 500 | 510 | 520 | 530 | 540 |
| GCTTTCCAGC | GCCGGGCAGG | AGGGGTCCTA | GTTGCCTCCC | ATCTGCAGAG | CTTCCTGGAG |
| 550 | 560 | 570 | 580 | 590 | 600 |
| GTGTCGTACC | GCGTTCTACG | CCACCTTGCC | CAGCCTAACA | ACACCAACAA | TACCAACAAT |
| 610 | 620 | 630 | 640 | 650 | 660 |
| ACAAACAACA | CCAACAATAC | CAACAATACA | AACAACACCA | ACAATACCAA | CAATACAAAC |
| 670 | 680 | 690 | 700 | 710 | 720 |
| AACACCAACA | ATACCAACAA | TACAAACAAC | ACCAACAATA | CCAACAATAC | AAACAACACC |
| 730 | 740 | 750 | 760 | 770 | 780 |
| AACAATACCA | ACAATACAAA | CAACACCAAC | AATACCAACA | ATACAAACAA | CACCAATAAT |
| 790 | 800 | 810 | 820 | 830 | 840 |
| ACCAACAATA | CAAACAACAC | CAATAATACC | AACAATACAA | ACAACACCAA | TAATACCAAC |
| 850 | 860 | 870 | 880 | 890 | 900 |
| AATACAAACA | ACACCAATAA | TACCAACAAT | ACAAACAACA | CCAATAATAC | CAACAATACA |
| 910 | 920 | 930 | 940 | 950 | 960 |
| AACAACACCA | ATAATACCAA | CAATACAAAC | AACACCAATA | ATACCAACAA | TACAAACAAC |
| 970 | 980 | 990 | 1000 | 1010 | 1020 |
| ACCAATAATA | CCAACAATAC | AAACAACACC | AATAATACCA | ACAATACAAA | CAACACCAAT |
| 1030 | 1040 | 1050 | 1060 | 1070 | 1080 |
| AATACCAACA | ATACAAACAA | CTAG...... | .......... | .......... | .......... |

TABLE 5

EPO
Homo sapiens erythropoietin (EPO), mRNA.
ACCESSION NM_000799
VERSION NM_000799.2 GI: 62240996

(SEQ ID NO: 2452)

MGVHECPAWLWLLLSLLSLPLGLPVLGAPPRLICDSRVLERYLLEAKEAENITTGCAEHCSLNENITVPDTKVNF
YAWKRMEVGQQAVEVWQGLALLSEAVLRGQALLVNSSQPWEPLQLHVDKAVSGLRSLTTLLRALGAQKEAISPPD
AASAAPLRTITADTFRKLFRVYSNFLRGKLKLYTGEACRTGDR

(SEQ ID NO: 2453)

| | |
|---|---|
| 1 | cccggagccg gaccggggcc accgcgcccg ctctgctccg acaccgcgcc ccctggacag |
| 61 | ccgccctctc ctccaggccc gtggggctgg ccctgcaccg ccgagcttcc cgggatgagg |
| 121 | gcccccggtg tggtcacccg gcgcgcccca ggtcgctgag ggaccccggc caggcgcgga |
| 181 | gatgggggtg cacgaatgtc ctgcctggct gtggcttctc ctgtccctgc tgtcgctccc |
| 241 | tctgggcctc ccagtcctgg gcgccccacc acgcctcatc tgtgacagcc gagtcctgga |
| 301 | gaggtacctc ttggaggcca aggaggccga gaatatcacg acgggctgtg ctgaacactg |
| 361 | cagcttgaat gagaatatca ctgtcccaga caccaaagtt aatttctatg cctggaagag |
| 421 | gatggaggtc gggcagcagg ccgtagaagt ctggcagggc ctggccctgc tgtcggaagc |
| 481 | tgtcctgcgg ggccaggccc tgttggtcaa ctcttcccag ccgtgggagc ccctgcagct |
| 541 | gcatgtggat aaagccgtca gtggccttcg cagcctcacc actctgcttc gggctctggg |
| 601 | agcccagaag gaagccatct cccctccaga tgcggcctca gctgctccac tccgaacaat |
| 661 | cactgctgac actttccgca aactcttccg agtctactcc aatttcctcc ggggaaagct |
| 721 | gaagctgtac acaggggagg cctgcaggac aggggacaga tgaccaggtg tgtccacctg |
| 781 | ggcatatcca ccacctccct caccaacatt gcttgtgcca caccctcccc cgccactcct |
| 841 | gaaccccgtc gaggggctct cagctcagcg ccagcctgtc ccatggacac tccagtgcca |
| 901 | gcaatgacat ctcaggggcc agaggaactg tccagagagc aactctgaga tctaaggatg |
| 961 | tcacagggcc aacttgaggg cccagagcag gaagcattca gagagcagct ttaaactcag |
| 1021 | ggacagagcc atgctgggaa gacgcctgag ctcactcggc accctgcaaa atttgatgcc |
| 1081 | aggacacgct ttggaggcga tttacctgtt ttcgcaccta ccatcaggga caggatgacc |
| 1141 | tggagaactt aggtggcaag ctgtgacttc tccaggtctc acgggcatgg gcactccctt |
| 1201 | ggtggcaaga gcccccttga caccggggtg gtgggaacca tgaagacagg atgggggctg |
| 1261 | gcctctggct ctcatggggt ccaagttttg tgtattcttc aacctcattg acaagaactg |
| 1321 | aaaccaccaa aaaaaaaaaa |

MCSF
Homo sapiens colony stimulating factor 1 (macrophage)
(CSF1), transcript variant 4, mRNA.
ACCESSION NM_172212
VERSION NM_172212.1 GI: 27262666

(SEQ ID NO: 2454)

MTAPGAAGRCPPTTWLGSLLLLVCLLASRSITEEVSEYCSHMIGSGHLQSLQRLIDSQMETSCQITFEFVDQEQL
KDPVCYLKKAFLLVQDIMEDTMRFRDNTPNAIAIVQLQELSLRLKSCFTKDYEEHDKACVRTFYETPLQLLEKVK
NVFNETKNLLDKDWNIFSKNCNNSFAECSSQDVVTKPDCNCLYPKAIPSSDPASVSPHQPLAPSMAPVAGLTWED
SEGTEGSSLLPGEQPLHTVDPGSAKQRPPRSTCQSFEPPETPVVKDSTIGGSPQPRPSVGAFNPGMEDILDSAMG
TNWVPEEASGEASEIPVPQGTELSPSRPGGGSMQTEPARPSNFLSASSPLPASAKGQQPADVTGTALPRVGPVRP
TGQDWNHTPQKTDHPSALLRDPPEPGSPRISSLRPQGLSNPSTLSAQPQLSRSHSSGSVLPLGELEGRRSTRDRR
SPAEPEGGPASEGAARPLPRFNSVPLTDTGHERQSEGSSSPQLQESVFHLLVPSVILVLLAVGGLLFYRWRRRSH
QRADSPLEQPEGSPLTQDDRQVELPVQEP

(SEQ ID NO: 2455)

| | |
|---|---|
| 1 | gagggctggc cagtgaggct cggcccgggg aaagtgaaag tttgcctggg tcctctcggc |
| 61 | gccagagccg ctctccgcat cccaggacag cggtgcggcc ctcggccggg gcgcccactc |
| 121 | cgcagcagcc agcgagcgag cgagcgagcg agggcggccg acgcgcccgg ccgggaccca |
| 181 | gctgcccgta tgaccgcgcc gggcgccgcc gggcgctgcc ctcccacgac atggctgggc |
| 241 | tccctgctgt tgttggtctg tctcctggcg agcaggagta tcaccgagga ggtgtcggag |
| 301 | tactgtagcc acatgattgg gagtggacac ctgcagtctc tgcagcggct gattgacagt |
| 361 | cagatggaga cctcgtgcca aattacattt gagtttgtag accaggaaca gttgaaagat |
| 421 | ccagtgtgct accttaagaa ggcatttctc ctggtacaag acataatgga ggacaccatg |
| 481 | cgcttcagag ataacacccc caatgccatc gccattgtgc agctgcagga actctctttg |
| 541 | aggctgaaga gctgcttcac caaggattat gaagagcatg acaaggcctg cgtccgaact |
| 601 | ttctatgaga cacctctcca gttgctggag aaggtcaaga atgtctttaa tgaaacaaag |
| 661 | aatctccttg acaaggactg gaatattttc agcaagaact gcaacaacag ctttgctgaa |
| 721 | tgctccagcc aagatgtggt gaccaagcct gattgcaact gcctgtaccc caaagccatc |
| 781 | cctagcagtg acccggcctc tgtctcccct catcagcccc tcgccccctc catggcccct |
| 841 | gtggctggct tgacctggga ggactctgag ggaactgagg gcagctccct cttgcctggt |
| 901 | gagcagcccc tgcacacagt ggatccaggc agtgccaagc agcggccacc caggagcacc |
| 961 | tgccagagct ttgagccgcc agagacccca gttgtcaagg acagcaccat cggtggctca |
| 1021 | ccacagcctc gcccctctgt cggggccttc aaccccggga tggaggatat tcttgactct |
| 1081 | gcaatgggca ctaattgggt cccagaagaa gcctctggag aggccagtga gattcccgta |
| 1141 | ccccaaggga cagagctttc cccctccagg ccaggagggg gcagcatgca gacagagccc |
| 1201 | gccagaccca gcaacttcct ctcagcatct tctccactcc ctgcatcagc aaagggccaa |
| 1261 | cagccggcag atgtaactgg tacagccttg cccagggtgg gccccgtgag gcccactggc |
| 1321 | caggactgga atcacacccc ccagaagaca gaccatccat ctgccctgct cagagacccc |
| 1381 | ccggagccag gctctcccag gatctcatca ctgcgccccc agggcctcag caacccctcc |
| 1441 | accctctctg ctcagccaca gctttccaga agccactcct cgggcagcgt gctgcccctt |
| 1501 | ggggagctgg agggcaggag gagcaccagg gatcggagga gccccgcaga gccagaagga |
| 1561 | ggaccagcaa gtgaaggggc agccaggccc ctgccccgtt ttaactccgt tcctttgact |
| 1621 | gacacaggcc atgagaggca gtccgaggga tcctccagcc cgcagctcca ggagtctgtc |
| 1681 | ttccacctgc tggtgcccag tgtcatcctg gtcttgctgg ccgtcggagg cctcttgttc |
| 1741 | tacaggtgga ggcggcggag ccatcaagag cctcagagag cggattctcc cttggagcaa |
| 1801 | ccagagggca gccccctgac tcaggatgac agacaggtgg aactgccagt gtagagggaa |
| 1861 | ttctaagacc cctcaccatc ctggacacac tcgtttgtca atgtccctct gaaaatgtga |
| 1921 | cgcccagccc cggacacagt actccagatg ttgtctgacc agctcagaga gagtacagtg |
| 1981 | ggactgttac cttccttgat atggacagta ttcttctatt tgtgcagatt aagattgcat |
| 2041 | tagttttttt cttaacaact gcatcatact gttgtcatat gttgagcctg tggttctata |
| 2101 | aaacccctag ttccatttcc cataaacttc tgtcaagcca gaccatctct accctgtact |
| 2161 | tggacaactt aactttttta accaaagtgc agtttatgtt cacctttgtt aaagccacct |
| 2221 | ttgtggtttc tgcccatcac ctgaacctac tgaagttgtg tgaaatccta attctgtcat |
| 2281 | ctccgtagcc ctcccagttg tgcctcctgc acattgatga gtgcctgctg ttgtctttgc |
| 2341 | ccatgttgtt gatgtagctg tgaccctatt gttcctcacc cctgcccccc gccaacccca |
| 2401 | gctggcccac ctcttccccc tcccacccaa gcccacagcc agcccatcag gaagccttcc |
| 2461 | tggcttctcc acaaccttct gactgtcttt tcagtcatgc cccctgctct tttgtatttg |
| 2521 | gctaatagta tatcaatttg cactt |

Homo sapiens colony stimulating factor 1 (macrophage)
(CSF1), transcript variant 3, mRNA.
ACCESSION NM_172211
VERSION NM_172211.1 GI: 27262664

(SEQ ID NO: 2456)

MTAPGAAGRCPPTTWLGSLLLLVCLLASRSITEEVSEYCSHMIGSGHLQSLQRLIDSQMETSCQITFEFVDQEQL
KDPVCYLKKAFLLVQDIMEDTMRFRDNTPNAIAIVQLQELSLRLKSCFTKDYEEHDKACVRTFYETPLQLLEKVK
NVFNETKNLLDKDWNIFSKNCNNSFAECSSQGHERQSEGSSSPQLQESVFHLLVPSVILVLLAVGGLLFYRWRRR
SHQEPQRADSPLEQPEGSPLTQDDRQVELPV

(SEQ ID NO: 2457)

| | |
|---|---|
| 1 | gagggctggc cagtgaggct cggcccgggg aaagtgaaag tttgcctggg tcctctcggc |
| 61 | gccagagccg ctctccgcat cccaggacag cggtgcggcc ctcggccggg gcgcccactc |
| 121 | cgcagcagcc agcgagcgag cgagcgagcg agggcggccg acgcgcccgg ccgggaccca |
| 181 | gctgcccgta tgaccgcgcc gggcgccgcc gggcgctgcc ctcccacgac atggctgggc |
| 241 | tccctgctgt tgttggtctg tctcctggcg agcaggagta tcaccgagga ggtgtcggag |
| 301 | tactgtagcc acatgattgg gagtggacac ctgcagtctc tgcagcggct gattgacagt |
| 361 | cagatggaga cctcgtgcca aattacattt gagtttgtag accaggaaca gttgaaagat |
| 421 | ccagtgtgct accttaagaa ggcatttctc ctggtacaag acataatgga ggacaccatg |
| 481 | cgcttcagag ataacacccc caatgccatc gccattgtgc agctgcagga actctctttg |
| 541 | aggctgaaga gctgcttcac caaggattat gaagagcatg acaaggcctg cgtccgaact |
| 601 | ttctatgaga cacctctcca gttgctggag aaggtcaaga atgtctttaa tgaaacaaag |
| 661 | aatctccttg acaaggactg gaatattttc agcaagaact gcaacaacag ctttgctgaa |
| 721 | tgctccagcc aaggccatga gaggcagtcc gagggatcct ccagcccgca gctccaggag |
| 781 | tctgtcttcc acctgctggt gcccagtgtc atcctggtct tgctggccgt cggaggcctc |
| 841 | ttgttctaca ggtggaggcg gcggagccat caagagcctc agagagcgga ttctcccttg |
| 901 | gagcaaccag agggcagccc cctgactcag gatgacagac aggtggaact gccagtgtag |
| 961 | agggaattct aagctggacg cacagaacag tctctccgtg ggaggagaca ttatggggcg |
| 1021 | tccaccacca cccctccctg gccatcctcc tggaatgtgg tctgccctcc accagagctc |
| 1081 | ctgcctgcca ggactggacc agagcagcca ggctggggcc cctctgtctc aacccgcaga |
| 1141 | cccttgactg aatgagagag gccagaggat gctccccatg ctgccactat ttattgtgag |
| 1201 | ccctggaggc tcccatgtgc ttgaggaagg ctggtgagcc cggctcagga ccctcttccc |
| 1261 | tcaggggctg caccctcctc tcactccctt ccatgccgga acccaggcca gggacccacc |
| 1321 | ggcctgtggt ttgtgggaaa gcagggtgga cgctgaggag tgaaagaacc ctgcacccag |
| 1381 | agggcctgcc tggtgccaag gtatcccagc ctggacaggc atggacctgt ctccagagag |
| 1441 | aggagcctga agttcgtggg gcgggacagc gtcggcctga tttcccgtaa aggtgtgcag |
| 1501 | cctgagagac gggaagagga ggcctctgga cctgctggtc tgcactgaca gcctgaaggg |
| 1561 | tctacaccct cggctcacct aagtgccctg tgctggttgc caggcgcaga ggggaggcca |
| 1621 | gccctgccct caggacctgc ctgacctgcc agtgatgcca agagggggat caagcactgg |
| 1681 | cctctgcccc tcctccttcc agcacctgcc agagcttctc caggaggcca agcagaggct |
| 1741 | cccctcatga aggaagccat tgcactgtga acactgtacc tgcctgctga acagcctgcc |
| 1801 | cccgtccatc catgagccag catccgtccg tcctccactc tccagcctct cccca |

Homo sapiens colony stimulating factor 1 (macrophage)
(CSF1), transcript variant 2, mRNA.
ACCESSION NM_172210
VERSION NM_172210.1 GI: 27262662

(SEQ ID NO: 2458)

MTAPGAAGRCPPTTWLGSLLLLVCLLASRSITEEVSEYCSHMIGSGHLQSLQRLIDSQMETSCQITFEFVDQEQL
KDPVCYLKKAFLLVQDIMEDTMRFRDNTPNAIAIVQLQELSLRLKSCFTKDYEEHDKACVRTFYETPLQLLEKVK
NVFNETKNLLDKDWNIFSKNCNNSFAECSSQDVVTKPDCNCLYPKAIPSSDPASVSPHQPLAPSMAPVAGLTWED
SEGTEGSSLLPGEQPLHTVDPGSAKQRPPRSTCQSFEPPETPVVKDSTIGGSPQPRPSVGAFNPGMEDILDSAMG
TNWVPEEASGEASEIPVPQGTELSPSRPGGGSMQTEPARPSNFLSASSPLPASAKGQQPADVTGHERQSEGSSSP
QLQESVFHLLVPSVILVLLAVGGLLFYRWRRRSHQEPQRADSPLEQPEGSPLTQDDRQVELPV

(SEQ ID NO: 2459)

| | |
|---|---|
| 1 | gagggctggc cagtgaggct cggcccgggg aaagtgaaag tttgcctggg tcctctcggc |
| 61 | gccagagccg ctctccgcat cccaggacag cggtgcggcc ctcggccggg gcgcccactc |
| 121 | cgcagcagcc agcgagcgag cgagcgagcg agggcggccg acgcgcccgg ccgggaccca |
| 181 | gctgcccgta tgaccgcgcc gggcgccgcc gggcgctgcc ctcccacgac atggctgggc |
| 241 | tccctgctgt tgttggtctg tctcctggcg agcaggagta tcaccgagga ggtgtcggag |
| 301 | tactgtagcc acatgattgg gagtggacac ctgcagtctc tgcagcggct gattgacagt |
| 361 | cagatggaga cctcgtgcca aattacattt gagtttgtag accaggaaca gttgaaagat |
| 421 | ccagtgtgct accttaagaa ggcatttctc ctggtacaag acataatgga ggacaccatg |
| 481 | cgcttcagag ataacacccc caatgccatc gccattgtgc agctgcagga actctctttg |
| 541 | aggctgaaga gctgcttcac caaggattat gaagagcatg acaaggcctg cgtccgaact |
| 601 | ttctatgaga cacctctcca gttgctggag aaggtcaaga atgtctttaa tgaaacaaag |
| 661 | aatctccttg acaaggactg gaatattttc agcaagaact gcaacaacag ctttgctgaa |
| 721 | tgctccagcc aagatgtggt gaccaagcct gattgcaact gcctgtaccc caaagccatc |
| 781 | cctagcagtg acccggcctc tgtctcccct catcagcccc tcgccccctc catggcccct |
| 841 | gtggctggct tgacctggga ggactctgag ggaactgagg gcagctccct cttgcctggt |
| 901 | gagcagcccc tgcacacagt ggatccaggc agtgccaagc agcggccacc caggagcacc |
| 961 | tgccagagct ttgagccgcc agagacccca gttgtcaagg acagcaccat cggtggctca |
| 1021 | ccacagcctc gcccctctgt cggggccttc aaccccggga tggaggatat tcttgactct |
| 1081 | gcaatgggca ctaattgggt cccagaagaa gcctctggag aggccagtga gattcccgta |
| 1141 | ccccaaggga cagagctttc cccctccagg ccaggagggg gcagcatgca gacagagccc |
| 1201 | gccagaccca gcaacttcct ctcagcatct tctccactcc ctgcatcagc aaagggccaa |
| 1261 | cagccggcag atgtaactgg ccatgagagg cagtccgagg gatcctccag cccgcagctc |
| 1321 | caggagtctg tcttccacct gctggtgccc agtgtcatcc tggtcttgct ggccgtcgga |
| 1381 | ggcctcttgt tctacaggtg gaggcggcgg agccatcaag agcctcagag agcggattct |
| 1441 | cccttggagc aaccagaggg cagccccctg actcaggatg acagacaggt ggaactgcca |
| 1501 | gtgtagaggg aattctaag |

Homo sapiens colony stimulating factor 1 (macrophage)
(CSF1), transcript variant 1, mRNA.
ACCESSION NM_000757
VERSION NM_000757.3 GI: 27262660

(SEQ ID NO: 2460)

MTAPGAAGRCPPTTWLGSLLLLVCLLASRSITEEVSEYCSHMIGSGHLQSLQRLIDSQMETSCQITFEFVDQEQL
KDPVCYLKKAFLLVQDIMEDTMRFRDNTPNAIAIVQLQELSLRLKSCFTKDYEEHDKACVRTFYETPLQLLEKVK
NFVFNETKNLLDKDWNIFSKNCNNSFAECSSQDVVTKPDCNCLYPKAIPSSDPASVSPHQPLAPSMAPVAGLTWE
DSEGTEGSSLLPGEQPLHTVDPGSAKQRPPRSTCQSFEPPETPVVKDSTIGGSPQPRPSVGAFNPGMEDILDSAM
GTNWVPEEASGEASEIPVPQGTELSPSRPGGGSMQTEPARPSNFLSASSPLPASAKGQQPADVTGTALPRVGPVR
PTGQDWNHTPQKTDHPSALLRDPPEPGSPRISSLRPQGLSNPSTLSAQPQLSRSHSSGSVLPLGELEGRRSTRDR
RSPAEPEGGPASEGAARPLPRFNSVPLTDTGHERQSEGSSSPQLQESVFHLLVPSVILVLLAVGGLLFYRWRRRS
HQEPQRADSPLEQPEGSPLTQDDRQVELPV

(SEQ ID NO: 2461)

| | |
|---|---|
| 1 | gagggctggc cagtgaggct cggcccgggg aaagtgaaag tttgcctggg tcctctcggc |
| 61 | gccagagccg ctctccgcat cccaggacag cggtgcggcc ctcggccggg gcgcccactc |
| 121 | cgcagcagcc agcgagcgag cgagcgagcg agggcggccg acgcgcccgg ccgggaccca |
| 181 | gctgcccgta tgaccgcgcc gggcgccgcc gggcgctgcc ctcccacgac atggctgggc |
| 241 | tccctgctgt tgttggtctg tctcctggcg agcaggagta tcaccgagga ggtgtcggag |
| 301 | tactgtagcc acatgattgg gagtggacac ctgcagtctc tgcagcggct gattgacagt |
| 361 | cagatggaga cctcgtgcca aattacattt gagtttgtag accaggaaca gttgaaagat |
| 421 | ccagtgtgct accttaagaa ggcatttctc ctggtacaag acataatgga ggacaccatg |
| 481 | cgcttcagag ataacacccc caatgccatc gccattgtgc agctgcagga actctctttg |
| 541 | aggctgaaga gctgcttcac caaggattat gaagagcatg acaaggcctg cgtccgaact |
| 601 | ttctatgaga cacctctcca gttgctggag aaggtcaaga atgtctttaa tgaaacaaag |
| 661 | aatctccttg acaaggactg gaatattttc agcaagaact gcaacaacag ctttgctgaa |
| 721 | tgctccagcc aagatgtggt gaccaagcct gattgcaact gcctgtaccc caaagccatc |
| 781 | cctagcagtg acccggcctc tgtctcccct catcagcccc tcgccccctc catggcccct |
| 841 | gtggctggct tgacctggga ggactctgag ggaactgagg gcagctccct cttgcctggt |
| 901 | gagcagcccc tgcacacagt ggatccaggc agtgccaagc agcggccacc caggagcacc |
| 961 | tgccagagct ttgagccgcc agagacccca gttgtcaagg acagcaccat cggtggctca |
| 1021 | ccacagcctc gcccctctgt cggggccttc aaccccggga tggaggatat tcttgactct |
| 1081 | gcaatgggca ctaattgggt cccagaagaa gcctctggag aggccagtga gattcccgta |
| 1141 | ccccaaggga cagagctttc cccctccagg ccaggagggg gcagcatgca gacagagccc |
| 1201 | gccagaccca gcaacttcct ctcagcatct tctccactcc ctgcatcagc aaagggccaa |
| 1261 | cagccggcag atgtaactgg tacagccttg cccagggtgg gccccgtgag gcccactggc |
| 1321 | caggactgga atcacacccc ccagaagaca gaccatccat ctgccctgct cagagacccc |
| 1381 | ccggagccag gctctcccag gatctcatca ctgcgccccc agggcctcag caacccctcc |
| 1441 | accctctctg ctcagccaca gctttccaga agccactcct cgggcagcgt gctgcccctt |
| 1501 | ggggagctgg agggcaggag gagcaccagg gatcggagga gccccgcaga gccagaagga |
| 1561 | ggaccagcaa gtgaaggggc agccaggccc ctgccccgtt ttaactccgt tcctttgact |
| 1621 | gacacaggcc atgagaggca gtccgaggga tcctccagcc cgcagctcca ggagtctgtc |
| 1681 | ttccacctgc tggtgcccag tgtcatcctg gtcttgctgg ccgtcggagg cctcttgttc |
| 1741 | tacaggtgga ggcggcggag ccatcaagag cctcagagag cggattctcc cttggagcaa |
| 1801 | ccagagggca gccccctgac tcaggatgac agacaggtgg aactgccagt gtagagggaa |
| 1861 | ttctaagctg gacgcacaga acagtctctc cgtgggagga gacattatgg ggcgtccacc |
| 1921 | accacccctc cctggccatc ctcctggaat gtggtctgcc ctccaccaga gctcctgcct |
| 1981 | gccaggactg gaccagagca gccaggctgg ggcccctctg tctcaacccg cagacccttg |
| 2041 | actgaatgag agaggccaga ggatgctccc catgctgcca ctatttattg tgagccctgg |
| 2101 | aggctcccat gtgcttgagg aaggctggtg agcccggctc aggaccctct tccctcaggg |
| 2161 | gctgcaccct cctctcactc ccttccatgc cggaacccag gccagggacc caccggcctg |
| 2221 | tggtttgtgg gaaagcaggg tggacgctga ggagtgaaag aaccctgcac ccagagggcc |
| 2281 | tgcctggtgc caaggtatcc cagcctggac aggcatggac ctgtctccag agagaggagc |
| 2341 | ctgaagttcg tggggcggga cagcgtcggc ctgatttccc gtaaaggtgt gcagcctgag |
| 2401 | agacgggaag aggaggcctc tggacctgct ggtctgcact gacagcctga agggtctaca |
| 2461 | ccctcggctc acctaagtgc cctgtgctgg ttgccaggcg cagaggggag gccagccctg |
| 2521 | ccctcaggac ctgcctgacc tgccagtgat gccaagaggg ggatcaagca ctggcctctg |
| 2581 | cccctcctcc ttccagcacc tgccagagct tctccaggag gccaagcaga ggctcccctc |
| 2641 | atgaaggaag ccattgcact gtgaacactg tacctgcctg ctgaacagcc tgcccccgtc |
| 2701 | catccatgag ccagcatccg tccgtcctcc actctccagc ctctcccca |

GM-CSF
Homo sapiens colony stimulating factor 2 (granulocyte-
macrophage) (CSF2), mRNA.
ACCESSION NM_000758
VERSION NM_000758.2 GI: 27437029

(SEQ ID NO: 2462)

MWLQSLLLLGTVACSISAPARSPSPSTQPWEHVNAIQEARRLLNLSRDTAAEMNETVEVISEMFDLQEPTCLQTR
LELYKQGLRGSLTKLKGPLTMMASHYKQHCPPTPETSCATQIITFESFKENLKDFLLVIPFDCWEPVQE

(SEQ ID NO: 2463)

| | |
|---|---|
| 1 | acacagagag aaaggctaaa gttctctgga ggatgtggct gcagagcctg ctgctcttgg |
| 61 | gcactgtggc ctgcagcatc tctgcacccg cccgctcgcc cagccccagc acgcagccct |
| 121 | gggagcatgt gaatgccatc caggaggccc ggcgtctcct gaacctgagt agagacactg |
| 181 | ctgctgagat gaatgaaaca gtagaagtca tctcagaaat gtttgacctc caggagccga |
| 241 | cctgcctaca gacccgcctg gagctgtaca agcagggcct gcggggcagc ctcaccaagc |
| 301 | tcaagggccc cttgaccatg atggccagcc actacaagca gcactgccct ccaaccccgg |
| 361 | aaacttcctg tgcaacccag attatcacct ttgaaagttt caaagagaac ctgaaggact |
| 421 | ttctgcttgt catccccttt gactgctggg agccagtcca ggagtgagac cggccagatg |
| 481 | aggctggcca agccggggag ctgctctctc atgaaacaag agctagaaac tcaggatggt |
| 541 | catcttggag ggaccaaggg gtgggccaca gccatggtgg gagtggcctg gacctgccct |
| 601 | gggccacact gaccctgata caggcatggc agaagaatgg gaatatttta tactgacaga |
| 661 | aatcagtaat atttatatat ttatattttt aaaatattta tttatttatt tatttaagtt |
| 721 | catattccat atttattcaa gatgttttac cgtaataatt attattaaaa atatgcttct |
| 781 | a |

TNF-ALPHA TYPE II RECEPTOR
Homo sapiens tumor necrosis factor (TNF superfamily, member
2) (TNF), mRNA.
ACCESSION NM_000594
VERSION NM_000594.2 GI: 25952110

(SEQ ID NO: 2464)

MSTESMIRDVELAEEALPKKTGGPQGSRRCLFLSLFSFLIVAGATTLFCLLHFGVIGPQREEFPRDLSLISPLAQ
AVRSSSRTPSDKPVAHVVANPQAEGQLQWLNRRANALLANGVELRDNQLVVPSEGLYLIYSQVLFKGQGCPSTHV
LLTHTISRIAVSYQTKVNLLSAIKSPCQRETPEGAEAKPWYEPIYLGGVFQLEKGDRLSAEINRPDYLDFAESGQ
VYFGIIAL

(SEQ ID NO: 2465)

| | |
|---|---|
| 1 | ctccctcagc aaggacagca gaggaccagc taagagggag agaagcaact acagaccccc |
| 61 | cctgaaaaca accctcagac gccacatccc ctgacaagct gccaggcagg ttctcttcct |
| 121 | ctcacatact gacccacggc tccaccctct ctcccctgga aaggacacca tgagcactga |
| 181 | aagcatgatc cgggacgtgg agctggccga ggaggcgctc cccaagaaga caggggggcc |
| 241 | ccagggctcc aggcggtgct tgttcctcag cctcttctcc ttcctgatcg tggcaggcgc |
| 301 | caccacgctc ttctgcctgc tgcactttgg agtgatcggc ccccagaggg aagagttccc |
| 361 | cagggacctc tctctaatca gccctctggc ccaggcagtc agatcatctt ctcgaacccc |
| 421 | gagtgacaag cctgtagccc atgttgtagc aaaccctcaa gctgaggggc agctccagtg |
| 481 | gctgaaccgc cgggccaatg ccctcctggc caatggcgtg gagctgagag ataaccagct |
| 541 | ggtggtgcca tcagagggcc tgtacctcat ctactcccag gtcctcttca agggccaagg |
| 601 | ctgcccctcc acccatgtgc tcctcaccca caccatcagc cgcatcgccg tctcctacca |
| 661 | gaccaaggtc aacctcctct ctgccatcaa gagcccctgc cagagggaga ccccagaggg |
| 721 | ggctgaggcc aagccctggt atgagcccat ctatctggga ggggtcttcc agctggagaa |
| 781 | gggtgaccga ctcagcgctg agatcaatcg gcccgactat ctcgactttg ccgagtctgg |
| 841 | gcaggtctac tttgggatca ttgccctgtg aggaggacga acatccaacc ttcccaaacg |
| 901 | cctcccctgc cccaatccct ttattacccc ctccttcaga caccctcaac ctcttctggc |
| 961 | tcaaaaagag aattgggggc ttagggtcgg aacccaagct tagaacttta agcaacaaga |
| 1021 | ccaccacttc gaaacctggg attcaggaat gtgtggcctg cacagtgaag tgctggcaac |
| 1081 | cactaagaat tcaaactggg gcctccagaa ctcactgggg cctacagctt tgatccctga |
| 1141 | catctggaat ctggagacca gggagccttt ggttctggcc agaatgctgc aggacttgag |
| 1201 | aagacctcac ctagaaattg acacaagtgg accttaggcc ttcctctctc cagatgtttc |
| 1261 | cagacttcct tgagacacgg agcccagccc tccccatgga gccagctccc tctatttatg |
| 1321 | tttgcacttg tgattattta ttatttattt attatttatt tatttacaga tgaatgtatt |
| 1381 | tatttgggag accggggtat cctgggggac ccaatgtagg agctgccttg gctcagacat |
| 1441 | gttttccgtg aaaacggagc tgaacaatag gctgttccca tgtagccccc tggcctctgt |
| 1501 | gccttctttt gattatgttt tttaaaatat ttatctgatt aagttgtcta aacaatgctg |
| 1561 | atttggtgac caactgtcac tcattgctga gcctctgctc cccaggggag ttgtgtctgt |
| 1621 | aatcgcccta ctattcagtg gcgagaaata aagtttgctt agaaaagaa |

DEFINITION Homo sapiens tumor necrosis factor receptor
superfamily, member 1A (TNFRSF1A), mRNA.
ACCESSION NM_001065
VERSION NM_001065.2 GI: 23312372

(SEQ ID NO: 2466)

MGLSTVPDLLLPLVLLELLVGIYPSGVIGLVPHLGDREKRDSVCPQGKYIHPQNNSICCTKCHKGTYLY
NDCPGPGQDTDCRECESGSFTASENHLRHCLSCSKCRKEMGQVEISSCTVDRDTVCGCRKNQYRHYWSENLFQCF
NCSLCLNGTVHLSCQEKQNTVCTCHAGFFLRENECVSCSNCKKSLECTKLCLPQIENVKGTEDSGTTVLLPLVIF
FGLCLLSLLFIGLMYRYQRWKSKLYSIVCGKSTPEKEGELEGTTTKPLAPNPSFSPTPGFTPTLGFSPVPSSTFT
SSSTYTPGDCPNFAAPRREVAPPYQGADPILATALASDPIPNPLQKWEDSAHKPQSLDTDDPATLYAVVENVPPL
RWKEFVRRLGLSDHEIDRLELQNGRCLREAQYSMLATWRRRTPRREATLELLGRVLRDMDLLGCLEDIEEALCGP
AALPPAPSLLR

(SEQ ID NO: 2467)

| | |
|---|---|
| 1 | gctgttgcaa cactgcctca ctcttcccct cccaccttct ctcccctcct ctctgcttta |
| 61 | attttctcag aattctctgg actgaggctc cagttctggc ctttggggtt caagatcact |
| 121 | gggaccaggc cgtgatctct atgcccgagt ctcaaccctc aactgtcacc ccaaggcact |
| 181 | tgggacgtcc tggacagacc gagtcccggg aagccccagc actgccgctg ccacactgcc |
| 241 | ctgagcccaa atgggggagt gagaggccat agctgtctgg catgggcctc tccaccgtgc |
| 301 | ctgacctgct gctgccactg gtgctcctgg agctgttggt gggaatatac ccctcagggg |
| 361 | ttattggact ggtccctcac ctaggggaca gggagaagag agatagtgtg tgtccccaag |
| 421 | gaaaatatat ccaccctcaa aataattcga tttgctgtac caagtgccac aaaggaacct |
| 481 | acttgtacaa tgactgtcca ggcccggggc aggatacgga ctgcagggag tgtgagagcg |
| 541 | gctccttcac cgcttcagaa aaccacctca gacactgcct cagctgctcc aaatgccgaa |
| 601 | aggaaatggg tcaggtggag atctcttctt gcacagtgga ccgggacacc gtgtgtggct |
| 661 | gcaggaagaa ccagtaccgg cattattgga gtgaaaacct tttccagtgc ttcaattgca |
| 721 | gcctctgcct caatgggacc gtgcacctct cctgccagga gaaacagaac accgtgtgca |
| 781 | cctgccatgc aggtttcttt ctaagagaaa acgagtgtgt ctcctgtagt aactgtaaga |
| 841 | aaagcctgga gtgcacgaag ttgtgcctac cccagattga gaatgttaag ggcactgagg |
| 901 | actcaggcac cacagtgctg ttgcccctgg tcattttctt tggtctttgc cttttatccc |
| 961 | tcctcttcat tggtttaatg tatcgctacc aacggtggaa gtccaagctc tactccattg |
| 1021 | tttgtgggaa atcgacacct gaaaaagagg gggagcttga aggaactact actaagcccc |
| 1081 | tggccccaaa cccaagcttc agtcccactc caggcttcac ccccaccctg ggcttcagtc |
| 1141 | ccgtgcccag ttccaccttc acctccagct ccacctatac ccccggtgac tgtcccaact |
| 1201 | ttgcggctcc ccgcagagag gtggcaccac cctatcaggg ggctgacccc atccttgcga |
| 1261 | cagccctcgc ctccgacccc atccccaacc cccttcagaa gtgggaggac agcgcccaca |
| 1321 | agccacagag cctagacact gatgaccccg cgacgctgta cgccgtggtg gagaacgtgc |
| 1381 | ccccgttgcg ctggaaggaa ttcgtgcggc gcctagggct gagcgaccac gagatcgatc |
| 1441 | ggctggagct gcagaacggg cgctgcctgc gcgaggcgca atacagcatg ctggcgacct |
| 1501 | ggaggcggcg cacgccgcgg cgcgaggcca cgctggagct gctgggacgc gtgctccgcg |
| 1561 | acatggacct gctgggctgc ctggaggaca tcgaggaggc gctttgcggc cccgccgccc |
| 1621 | tcccgcccgc gcccagtctt ctcagatgag gctgcgcccc tgcgggcagc tctaaggacc |
| 1681 | gtcctgcgag atcgccttcc aaccccactt ttttctggaa aggaggggtc ctgcaggggc |
| 1741 | aagcaggagc tagcagccgc ctacttggtg ctaacccctc gatgtacata gcttttctca |
| 1801 | gctgcctgcg cgccgccgac agtcagcgct gtgcgcgcgg agagaggtgc gccgtgggct |
| 1861 | caagagcctg agtgggtggt ttgcgaggat gagggacgct atgcctcatg cccgttttgg |
| 1921 | gtgtcctcac cagcaaggct gctcgggggc ccctggttcg tccctgagcc tttttcacag |
| 1981 | tgcataagca gttttttttg tttttgtttt gttttgtttt gtttttaaat caatcatgtt |
| 2041 | acactaatag aaacttggca ctcctgtgcc ctctgcctgg acaagcacat agcaagctga |
| 2101 | actgtcctaa ggcaggggcg agcacggaac aatggggcct tcagctggag ctgtggactt |
| 2161 | ttgtacatac actaaaattc tgaagttaaa gctctgctct tggaaaaaaa aaaaaaaaaa |
| 2221 | aaaaaaaaaa aaaaaa |

BETA INTERFERON
Homo sapiens interferon, beta 1, fibroblast (IFNB1), mRNA.
ACCESSION NM_002176
VERSION NM_002176.2 GI: 50593016

(SEQ ID NO: 2468)

MTNKCLLQIALLLCFSTTALSMSYNLLGFLQRSSNFQCQKLLWQLNGRLEYCLKDRMNFDIPEEIKQLQQFQKED
AALTIYEMLQNIFAIFRQDSSSTGWNETIVENLLANVYHQINHLKTVLEEKLEKEDFTRGKLMSSLHLKRYYGRI
LHYLKAKEYSHCAWTIVRVEILRNFYFINRLTGYLRN

(SEQ ID NO: 2469)

| | |
|---|---|
| 1 | acattctaac tgcaaccttt cgaagccttt gctctggcac aacaggtagt aggcgacact |
| 61 | gttcgtgttg tcaacatgac caacaagtgt ctcctccaaa ttgctctcct gttgtgcttc |
| 121 | tccactacag ctctttccat gagctacaac ttgcttggat tcctacaaag aagcagcaat |
| 181 | tttcagtgtc agaagctcct gtggcaattg aatgggaggc ttgaatactg cctcaaggac |
| 241 | aggatgaact ttgacatccc tgaggagatt aagcagctgc agcagttcca gaaggaggac |
| 301 | gccgcattga ccatctatga gatgctccag aacatctttg ctattttcag acaagattca |
| 361 | tctagcactg gctggaatga gactattgtt gagaacctcc tggctaatgt ctatcatcag |
| 421 | ataaaccatc tgaagacagt cctggaagaa aaactggaga aagaagattt caccagggga |
| 481 | aaactcatga gcagtctgca cctgaaaaga tattatggga ggattctgca ttacctgaag |
| 541 | gccaaggagt acagtcactg tgcctggacc atagtcagag tggaaatcct aaggaacttt |
| 601 | tacttcatta acagacttac aggttacctc cgaaactgaa gatctcctag cctgtgcctc |
| 661 | tgggactgga caattgcttc aagcattctt caaccagcag atgctgttta agtgactgat |
| 721 | ggctaatgta ctgcatatga aaggacacta gaagattttg aaatttttat taaattatga |
| 781 | gttattttta tttatttaaa ttttattttg gaaaataaat tatttttggt gcaaaagtca |

GAMMA INTERFERON
Homo sapiens interferon, gamma (IFNG), mRNA.
ACCESSION NM_000619
VERSION NM_000619.2 GI: 56786137

(SEQ ID NO: 2470)

MKYTSYILAFQLCIVLGSLGCYCQDPYVKEAENLKKYFNAGHSDVADNGTLFLGILKNWKEESDRKIMQSQIVSF
YFKLFKNFKDDQSIQKSVETIKEDMNVKFFNSNKKKRDDFEKLTNYSVTDLNVQRKAIHELIQVMAELSPAAKTG
KRKRSQMLFRGRRASQ

(SEQ ID NO: 2471)

| | |
|---|---|
| 1 | cacattgttc tgatcatctg aagatcagct attagaagag aaagatcagt taagtccttt |
| 61 | ggacctgatc agcttgatac aagaactact gatttcaact tctttggctt aattctctcg |
| 121 | gaaacgatga aatatacaag ttatatcttg gcttttcagc tctgcatcgt tttgggttct |
| 181 | cttggctgtt actgccagga cccatatgta aaagaagcag aaaaccttaa gaaatatttt |
| 241 | aatgcaggtc attcagatgt agcggataat ggaactcttt tcttaggcat tttgaagaat |
| 301 | tggaaagagg agagtgacag aaaaataatg cagagccaaa ttgtctcctt ttacttcaaa |
| 361 | ctttttaaaa actttaaaga tgaccagagc atccaaaaga gtgtggagac catcaaggaa |
| 421 | gacatgaatg tcaagttttt caatagcaac aaaaagaaac gagatgactt cgaaaagctg |
| 481 | actaattatt cggtaactga cttgaatgtc caacgcaaag caatacatga actcatccaa |
| 541 | gtgatggctg aactgtcgcc agcagctaaa acagggaagc gaaaaaggag tcagatgctg |
| 601 | tttcgaggtc gaagagcatc ccagtaatgg ttgtcctgcc tgcaatattt gaattttaaa |
| 661 | tctaaatcta tttattaata tttaacatta tttatatggg gaatatattt ttagactcat |
| 721 | caatcaaata agtatttata atagcaactt ttgtgtaatg aaaatgaata tctattaata |
| 781 | tatgtattat ttataattcc tatatcctgt gactgtctca cttaatcctt tgttttctga |
| 841 | ctaattaggc aaggctatgt gattacaagg ctttatctca ggggccaact aggcagccaa |
| 901 | cctaagcaag atcccatggg ttgtgtgttt atttcacttg atgatacaat gaacacttat |
| 961 | aagtgaagtg atactatcca gttactgccg gtttgaaaat atgcctgcaa tctgagccag |
| 1021 | tgctttaatg gcatgtcaga cagaacttga atgtgtcagg tgaccctgat gaaaacatag |
| 1081 | catctcagga gatttcatgc ctggtgcttc caaatattgt tgacaactgt gactgtaccc |
| 1141 | aaatggaaag taactcattt gttaaaatta tcaatatcta atatatatga ataaagtgta |
| 1201 | agttcacaac aaaaaaaaaa aaaaaaaaaa aaaaaaaaaa |

HUMAN GROWTH HORMONE
Human growth hormone (somatotropin, GH1) gene, complete cds.
ACCESSION J00148 K00612
VERSION J00148.1 GI: 183145

(SEQ ID NO: 2472)

MATGSRTSLLLAFGLLCLPWLQEGSAFPTIPLSRLFDNASLRAHRLHQLAFDTYQEFNPQTSLCFSESIPTPSNR
EETQQKSNLELLRISLLLIQSWLEPVQFLRSVFANSLVYGASDSNVYDLLKDLEEGIQTLMGRLEDGSPRTGQIF
KQTYSKFDTNSHNDDALLKNYGLLYCFRKDMDKVETFLRIVQCRSVEGSCGF

(SEQ ID NO: 2473)

| | |
|---|---|
| 1 | agggcaccca cgtgaccctt aaagagagga caagttgggt ggtattttct ggctgacact |
| 61 | ctgtgcacaa ccctcacaac actggttgac ggtgggaagg gaaagatgac aagccagggg |
| 121 | catgatccca gcatgtgtgg gaggagcttc taaattatcc attagcacaa gcccgtcagt |
| 181 | ggccccatgc ataaatgtac acagaaacag gtgggggcaa cagtgggaga gaaggggcca |
| 241 | gggtataaaa agggcccaca agagaccggc tcaaggatcc caaggcccaa ctccccgaac |
| 301 | cactcagggt cctgtggacg ctcacctagc tgcaatggct acaggtaagc gcccctaaaa |
| 361 | tccctttggg cacaatgtgt cctgagggga gaggcagcga cctgtagatg ggacgggggc |
| 421 | actaaccctc aggtttgggg cttctgaatg agtatcgcca tgtaagccca gtatggccaa |
| 481 | tctcagaaag ctcctggtcc ctggagggat ggagagagaa aaacaaacag ctcctggagc |
| 541 | agggagagtg ctggcctctt gctctccggc tccctctgtt gccctctggt ttctccccag |
| 601 | gctcccggac gtccctgctc ctggcttttg gcctgctctg cctgccctgg cttcaagagg |
| 661 | gcagtgcctt cccaaccatt cccttatcca ggctttttga caacgctagt ctccgcgccc |
| 721 | atcgtctgca ccagctggcc tttgacacct accaggagtt tgtaagctct tggggaatgg |
| 781 | gtgcgcatca ggggtggcag gaaggggtga ctttcccccg ctgggaaata agaggaggag |
| 841 | actaaggagc tcagggtttt tcccgaagcg aaaatgcagg cagatgagca cacgctgagt |
| 901 | gaggttccca gaaaagtaac aatgggagct ggtctccagc gtagaccttg gtgggcggtc |
| 961 | cttctcctag gaagaagcct atatcccaaa ggaacagaag tattcattcc tgcagaaccc |
| 1021 | ccagacctcc ctctgtttct cagagtctat tccgacaccc tccaacaggg aggaaacaca |
| 1081 | acagaaatcc gtgagtggat gccttgaccc caggcgggga tgggggagac ctgtagtcag |
| 1141 | agcccccggg cagcacaggc caatgcccgt ccttcccctg cagaacctag agctgctccg |
| 1201 | catctccctg ctgctcatcc agtcgtggct ggagcccgtg cagttcctca ggagtgtctt |
| 1261 | cgccaacagc ctggtgtacg gcgcctctga cagcaacgtc tatgacctcc taaaggacct |
| 1321 | agaggaaggc atccaaacgc tgatgggggt gggggtggcg ctaggggtcc ccaatcttgg |
| 1381 | agccccactg actttgagag ctgtgttaga gaaacactgc tgccctcttt ttagcagtcc |
| 1441 | aggccctgac ccaagagaac tcaccttatt cttcatttcc cctcgtgaat cctctagcct |
| 1501 | ttctctacac cctgaagggg agggaggaaa atgaatgaat gagaaaggga gggagcagta |
| 1561 | cccaagcgct tggcctctcc ttctcttcct tcactttgca gaggctggaa gatggcagcc |
| 1621 | cccggactgg gcagatcttc aagcagacct acagcaagtt cgacacaaac tcacacaacg |
| 1681 | atgacgcact actcaagaac tacgggctgc tctactgctt caggaaggac atggacaagg |
| 1741 | tcgagacatt cctgcgcatc gtgcagtgcc gctctgtgga gggcagctgt ggcttctagc |
| 1801 | tgcccgggtg gcatccctgt gacccctccc cagtgcctct cctggccttg gaagttgcca |
| 1861 | ctccagtgcc caccagcctt gtcctaataa aattaagttg catcattttg tctgactagg |
| 1921 | tgtcctctat aatattatgg ggtggagggg ggtggtttgg agca |

COAGULATION FACTORS
Homo sapiens coagulation factor VII (serum prothrombin
conversion accelerator) (F7), transcript variant 2, mRNA.
ACCESSION NM_019616
VERSION NM_019616.1 GI: 10518502

(SEQ ID NO: 2474)

MVSQALRLLCLLLGLQGCLAAVFVTQEEAHGVLHRRRRANAFLEELRPGSLERECKEEQCSFEEAREIFKDAERT
KLFWISYSDGDQCASSPCQNGGSCKDQLQSYICFCLPAFEGRNCETHKDDQLICVNENGGCEQYCSDHTGTKRSC
RCHEGYSLLADGVSCTPTVEYPCGKIPILEKRNASKPQGRIVGGKVCPKGECPWQVLLLVNGAQLCGGTLINTIW
VVSAAHCFDKIKNWRNLIAVLGEHDLSEHDGDEQSRRVAQVIIPSTYVPGTTNHDIALLRLHQPVVLTDHVVPLC
RTFSERTLAFVRFSLVSGWGQLLDRGATALELPELMVLNVPRLMTQDCLQQSRKVGDSPNITEYMFCAGYSDGSK
DSCKGDSGGPHATHYRGTWYLTGIVSWGQGCATVGHFGVYTRVSQYIEWLQKLMRSEPRPGVLLRAPFP

(SEQ ID NO: 2475)

| | |
|---|---|
| 1 | agtcccatgg ggaatgtcaa caggcagggg cagcactgca gagatttcat catggtctcc |
| 61 | caggccctca ggctcctctg ccttctgctt gggcttcagg gctgcctggc tgcagtcttc |
| 121 | gtaacccagg aggaagccca cggcgtcctg caccggcgcc ggcgcgccaa cgcgttcctg |
| 181 | gaggagctgc ggccgggctc cctggagagg gagtgcaagg aggagcagtg ctccttcgag |
| 241 | gaggcccggg agatcttcaa ggacgcggag aggacgaagc tgttctggat ttcttacagt |
| 301 | gatggggacc agtgtgcctc aagtccatgc cagaatgggg gctcctgcaa ggaccagctc |
| 361 | cagtcctata tctgcttctg cctccctgcc ttcgagggcc ggaactgtga gacgcacaag |
| 421 | gatgaccagc tgatctgtgt gaacgagaac ggcggctgtg agcagtactg cagtgaccac |
| 481 | acgggcacca agcgctcctg tcggtgccac gaggggtact ctctgctggc agacggggtg |
| 541 | tcctgcacac ccacagttga atatccatgt ggaaaaatac ctattctaga aaaaagaaat |
| 601 | gccagcaaac cccaaggccg aattgtgggg ggcaaggtgt gccccaaagg ggagtgtcca |
| 661 | tggcaggtcc tgttgttggt gaatggagct cagttgtgtg gggggaccct gatcaacacc |
| 721 | atctgggtgg tctccgcggc ccactgtttc gacaaaatca agaactggag gaacctgatc |
| 781 | gcggtgctgg gcgagcacga cctcagcgag cacgacgggg atgagcagag ccggcgggtg |
| 841 | gcgcaggtca tcatccccag cacgtacgtc ccgggcacca ccaaccacga catcgcgctg |
| 901 | ctccgcctgc accagcccgt ggtcctcact gaccatgtgg tgcccctctg cctgcccgaa |
| 961 | cggacgttct ctgagaggac gctggccttc gtgcgcttct cattggtcag cggctggggc |
| 1021 | cagctgctgg accgtggcgc cacggccctg gagctcatgg tgctcaacgt gccccggctg |
| 1081 | atgacccagg actgcctgca gcagtcacgg aaggtgggag actccccaaa tatcacggag |
| 1141 | tacatgttct gtgccggcta ctcggatggc agcaaggact cctgcaaggg ggacagtgga |
| 1201 | ggcccacatg ccacccacta ccggggcacg tggtacctga cgggcatcgt cagctggggc |
| 1261 | cagggctgcg caaccgtggg ccactttggg gtgtacacca gggtctccca gtacatcgag |
| 1321 | tggctgcaaa agctcatgcg ctcagagcca cgcccaggag tcctcctgcg agccccattt |
| 1381 | ccctagccca gcagccctgg cctgtggaga gaaagccaag gctgcgtcga actgtcctgg |
| 1441 | caccaaatcc catatattct tctgcagtta atggggtaga ggagggcatg ggagggaggg |
| 1501 | agaggtgggg agggagacag agacagaaac agagagagac agagacagag agagactgag |
| 1561 | ggagagactc tgaggacatg gagagagact caaagagact ccaagattca aagagactaa |
| 1621 | tagagacaca gagatggaat agaaaagatg agaggcagag gcagacaggc gctggacaga |
| 1681 | ggggcagggg agtgccaagg ttgtcctgga ggcagacagc ccagctgagc ctccttacct |
| 1741 | cccttcagcc aagccccacc tgcacgtgat ctgctggccc tcaggctgct gctctgcctt |
| 1801 | cattgctgga gacagtagag gcatgaacac acatggatgc acacacacac acgccaatgc |
| 1861 | acacacacag agatatgcac acacacggat gcacacacag atggtcacac agagatacgc |
| 1921 | aaacacaccg atgcacacgc acatagagat atgcacacac agatgcacac acagatatac |
| 1981 | acatggatgc acgcacatgc caatgcacgc acacatcagt gcacacggat gcacagagat |
| 2041 | atgcacacac cgatgtgcgc acacacagat atgcacacac atggatgagc acacacacac |
| 2101 | caagtgcgca cacacaccga tgtacacaca cagatgcaca cacagatgca cacacaccga |
| 2161 | tgctgactcc atgtgtgctg tcctctgaag gcggttgttt agctctcact tttctggttc |
| 2221 | ttatccatta tcatcttcac ttcagacaat tcagaagcat caccatgcat ggtggcgaat |
| 2281 | gcccccaaac tctcccccaa atgtatttct cccttcgctg ggtgccgggc tgcacagact |
| 2341 | attccccacc tgcttcccag cttcacaata aacggctgcg tctcctccgc acacctgtgg |
| 2401 | tgcctgccac cc |

Homo sapiens coagulation factor V (proaccelerin, labile
factor) (F5), mRNA.
ACCESSION NM_000130
VERSION NM_000130.2 GI: 10518500

(SEQ ID NO: 2476)

MFPGCPRLWVLVVLGTSWVGWGSQGTEAAQLRQFYVAAQGISWSYRPEPTNSSLNLSVTSFKKIVYREYEPYFKK
EKPQSTISGLLGPTLYAEVGDIIKVHFKNKADKPLSIHPQGIRYSKLSEGASYLDHTFPAEKMDDAVAPGREYTY
EWSISEDSGPTHDDPPCLTHIYYSHENLIEDFNSGLIGPLLICKKGTLTEGGTQKTFDKQIVLLFAVFDESKSWS
QSSSLMYTVNGYVNGTMPDITVCAHDHISWHLLGMSSGPELFSIHFNGQVLEQNHHKVSAITLVSATSTTANMTV
GPEGKWIISSLTPKHLQAGMQAYIDIKNCPKKTRNLKKITREQRRHMKRWEYFIAAEEVIWDYAPVIPANMDKKY
RSQHLDNFSNQIGKHYKKVMYTQYEDESFTKHTVNPNMKEDGILGPIIRAQVRDTLKIVFKNMASRPYSIYPHGV
TFSPYEDEVNSSFTSGRNNTMIRAVQPGETYTYKWNILEFDEPTENDAQCLTRPYYSDVDIMRDIASGLIGLLLI
CKSRSLDRRGIQRAADIEQQAVFAVFDENKSWYLEDNINKFCENPDEVKRDDPKFYESNIMSTINGYVPESITTL
GFCFDDTVQWHFCSVGTQNEILTIHFTGHSFIYGKRHEDTLTLFPMRGESVTVTMDNVGTWMLTSMNSSPRSKKL
RLKFRDVKCIPDDDEDSYEIFEPPESTVMATRKMHDRLEPEDEESDADYDYQNRLAAALGIRSFRNSSLNQEEEE
FNLTALALENGTEFVSSNTDIIVGSNYSSPSNISKFTVNNLAEPQKAPSHQQATTAGSPLRHLIGKNSVLNSSTA
EHSSPYSEDPIEDPLQPDVTGIRLLSLGAGEFRSQEHAKRKGPKVERDQAAKHRFSWMKLLAHKVGRHLSQDTGS
PSGMRPWEDLPSQDTGSPSRMRPWEDPPSDLLLLKQSNSSKILVGRWHLASEKGSYEIIQDTDEDTAVNNWLISP
QNASRAWGESTPLANKPGKQSGHPKFPRVRHKSLQVRQDGGKSRLKKSQFLIKTRKKKKEKHTHHAPLSPRTFHP
LRSEAYNTFSERRLKHSLVLHKSNETSLPTDLNQTLPSMDFGWIASLPDHNQNSSNDTGQASCPPGLYQTVPPEE
HYQTFPIQDPDQMHSTSDPSHRSSSPELSEMLEYDRSHKSFPTDISQMSPSSEHEVWQTVISPDLSQVTLSPELS
QTNLSPDLSHTTLSPELIQRNLSPALGQMPISPDLSHTTLSPDLSHTTLSLDLSQTNLSPELSQTNLSPALGQMP
LSPDLSHTTISLDFSQTNLSPELSHMTLSPELSQTNLSPALGQMPISPDLSHTTLSLDFSQTNLSPELSQTNLSP
ALGQMPLSPDPSHTTLSLDLSQTNLSPELSQTNLSPDLSEMPLFADLSQIPLTPDLDQMTLSPDLGETDLSPNFG
QMSLSPDLSQVTLSPDISDTTLLPDLSQISPPPDLDQIFYPSESSQSLLLQEFNESFPYPDLGQMPSPSSPTLND
TFLSKEFNPLVIVGLSKDGTDYIEIIPKEEVQSSEDDYAEIDYVPYDDPYKTDVRTNINSSRDPDNIAAWYLRSN
NGNRRNYYIAAEEISWDYSEFVQRETDIEDSDDIPEDTTYKKVVFRKYLDSTFTKRDPRGEYEEHLGILGPIIRA
EVDDVIQVRFKNLASRPYSLHAHGLSYEKSSEGKTYEDDSPEWFKEDNAVQPNSSYTYVWHATERSGPESPGSAC
RAWAYYSAVNPEKDIHSGLIGPLLICQKGILHKDSNMPVDMREFVLLFMTFDEKKSWYYEKKSRSSWRLTSSEMK
KSHEFHAINGMIYSLPGLKMYEQEWVRLHLLNIGGSQDIHVVHFHGQTLLENGNKQHQLGVWPLLPGSFKTLEMK
ASKPGWWLLNTEVGENQRAGMQTPFLIMDRDCRMPMGLSTGIISDSQIKASEFLGYWEPRLARLNNGGSYNAWSV
EKLAAEFASKPWIQVDMQKEVIITGIQTQGAKHYLKSCYTTEFYVAYSSNQINWQIFKGNSTRNVMYFNGNSDAS
TIKENQFDPPIVARYIRISPTRAYNRPTLRLELQGCEVNGCSTPLGMENGKIENKQITASSFKKSWWGDYWEPFR
ARLNAQGRVNAWQAKANNNKQWLEIDLLKIKKITAIITQGCKSLSSEMYVKSYTIHYSEQGVEWKPYRLKSSMVD
KIFEGNTNTKGHVKNFFNPPIISRFIRVIPKTWNQSIALRLELFGCDIY″

(SEQ ID NO: 2477)

| | |
|---|---|
| 1 | tcattgcagc tgggacagcc cggagtgtgg ttagcagctc ggcaagcgct gcccaggtcc |
| 61 | tggggtggtg gcagccagcg ggagcaggaa aggaagcatg ttcccaggct gcccacgcct |
| 121 | ctgggtcctg gtggtcttgg gcaccagctg ggtaggctgg gggagccaag ggacagaagc |
| 181 | ggcacagcta aggcagttct acgtggctgc tcagggcatc agttggagct accgacctga |
| 241 | gcccacaaac tcaagtttga atctttctgt aacttccttt aagaaaattg tctacagaga |
| 301 | gtatgaacca tattttaaga aagaaaaacc acaatctacc atttcaggac ttcttgggcc |
| 361 | tactttatat gctgaagtcg gagacatcat aaaagttcac tttaaaaata aggcagataa |
| 421 | gcccttgagc atccatcctc aaggaattag gtacagtaaa ttatcagaag gtgcttctta |
| 481 | ccttgaccac acattccctg cagagaagat ggacgacgct gtggctccag gccgagaata |
| 541 | cacctatgaa tggagtatca gtgaggacag tggacccacc catgatgacc ctccatgcct |
| 601 | cacacacatc tattactccc atgaaaatct gatcgaggat ttcaactctg ggctgattgg |
| 661 | gcccctgctt atctgtaaaa aagggaccct aactgagggt gggacacaga agacgtttga |
| 721 | caagcaaatc gtgctactat ttgctgtgtt tgatgaaagc aagagctgga gccagtcatc |
| 781 | atccctaatg tacacagtca atggatatgt gaatgggaca atgccagata taacagtttg |
| 841 | tgcccatgac cacatcagct ggcatctgct gggaatgagc tcggggccag aattattctc |
| 901 | cattcatttc aacggccagg tcctggagca gaaccatcat aaggtctcag ccatcaccct |
| 961 | tgtcagtgct acatccacta ccgcaaatat gactgtgggc ccagagggaa agtggatcat |
| 1021 | atcttctctc accccaaaac atttgcaagc tgggatgcag gcttacattg acattaaaaa |
| 1081 | ctgcccaaag aaaaccagga atcttaagaa aataactcgt gagcagaggc ggcacatgaa |
| 1141 | gaggtgggaa tacttcattg ctgcagagga agtcatttgg gactatgcac ctgtaatacc |
| 1201 | agcgaatatg gacaaaaaat acaggtctca gcatttggat aatttctcaa accaaattgg |
| 1261 | aaaacattat aagaaagtta tgtacacaca gtacgaagat gagtccttca ccaaacatac |
| 1321 | agtgaatccc aatatgaaag aagatgggat tttgggtcct attatcagag cccaggtcag |
| 1381 | agacacactc aaaatcgtgt tcaaaaatat ggccagccgc ccctatagca tttaccctca |
| 1441 | tggagtgacc ttctcgcctt atgaagatga agtcaactct tctttcacct caggcaggaa |
| 1501 | caacaccatg atcagagcag ttcaaccagg ggaaacctat acttataagt ggaacatctt |
| 1561 | agagtttgat gaacccacag aaaatgatgc ccagtgctta acaagaccat actacagtga |
| 1621 | cgtggacatc atgagagaca tcgcctctgg gctaatagga ctacttctaa tctgtaagag |
| 1681 | cagatccctg gacaggcgag gaatacagag ggcagcagac atcgaacagc aggctgtgtt |
| 1741 | tgctgtgttt gatgagaaca aaagctggta ccttgaggac aacatcaaca agttttgtga |
| 1801 | aaatcctgat gaggtgaaac gtgatgaccc caagttttat gaatcaaaca tcatgagcac |
| 1861 | tatcaatggc tatgtgcctg agagcataac tactcttgga ttctgctttg atgacactgt |
| 1921 | ccagtggcac ttctgtagtg tggggaccca gaatgaaatt ttgaccatcc acttcactgg |
| 1981 | gcactcattc atctatggaa agaggcatga ggacaccttg accctcttcc ccatgcgtgg |
| 2041 | agaatctgtg acggtcacaa tggataatgt tggaacttgg atgttaactt ccatgaattc |
| 2101 | tagtccaaga agcaaaaagc tgaggctgaa attcagggat gttaaatgta tcccagatga |
| 2161 | tgatgaagac tcatatgaga tttttgaacc tccagaatct acagtcatgg ctacacggaa |
| 2221 | aatgcatgat cgtttagaac ctgaagatga agagagtgat gctgactatg attaccagaa |
| 2281 | cagactggct gcagcattag gaattaggtc attccgaaac tcatcattga accaggaaga |
| 2341 | agaagagttc aatcttactg ccctagctct ggagaatggc actgaattcg tttcttcgaa |
| 2401 | cacagatata attgttggtt caaattattc ttccccaagt aatattagta agttcactgt |
| 2461 | caataacctt gcagaacctc agaaagcccc ttctcaccaa caagccacca cagctggttc |
| 2521 | cccactgaga cacctcattg gcaagaactc agttctcaat tcttccacag cagagcattc |
| 2581 | cagcccatat tctgaagacc ctatagagga tcctctacag ccagatgtca cagggatacg |
| 2641 | tctactttca cttggtgctg gagaattcag aagtcaagaa catgctaagc gtaagggacc |
| 2701 | caaggtagaa agagatcaag cagcaaagca caggttctcc tggatgaaat tactagcaca |
| 2761 | taaagttggg agacacctaa gccaagacac tggttctcct tccggaatga ggccctggga |
| 2821 | ggaccttcct agccaagaca ctggttctcc ttccagaatg aggccctggg aggaccctcc |
| 2881 | tagtgatctg ttactcttaa aacaaagtaa ctcatctaag attttggttg ggagatggca |
| 2941 | tttggcttct gagaaaggta gctatgaaat aatccaagat actgatgaag acacagctgt |
| 3001 | taacaattgg ctgatcagcc cccagaatgc ctcacgtgct tggggagaaa gcacccctct |
| 3061 | tgccaacaag cctggaaagc agagtggcca cccaaagttt cctagagtta gacataaatc |
| 3121 | tctacaagta agacaggatg gaggaaagag tagactgaag aaaagccagt ttctcattaa |
| 3181 | gacacgaaaa aagaaaaaag agaagcacac acaccatgct cctttatctc cgaggacctt |
| 3241 | tcaccctcta agaagtgaag cctacaacac attttcagaa agaagactta agcattcgtt |
| 3301 | ggtgcttcat aaatccaatg aaacatctct tcccacagac ctcaatcaga cattgccctc |
| 3361 | tatggatttt ggctggatag cctcacttcc tgaccataat cagaattcct caaatgacac |
| 3421 | tggtcaggca agctgtcctc caggtcttta tcagacagtg cccccagagg aacactatca |
| 3481 | aacattcccc attcaagacc ctgatcaaat gcactctact tcagacccca gtcacagatc |
| 3541 | ctcttctcca gagctcagtg aaatgcttga gtatgaccga agtcacaagt ccttccccac |
| 3601 | agatataagt caaatgtccc cttcctcaga acatgaagtc tggcagacag tcatctctcc |
| 3661 | agacctcagc caggtgaccc tctctccaga actcagccag acaaacctct ctccagacct |
| 3721 | cagccacacg actctctctc cagaactcat tcagagaaac ctttccccag ccctcggtca |
| 3781 | gatgcccatt tctccagacc tcagccatac aaccctttct ccagacctca gccatacaac |
| 3841 | cctttcttta gacctcagcc agacaaacct ctctccagaa ctcagtcaga caaacctttc |
| 3901 | tccagccctc ggtcagatgc ccctttctcc agacctcagc catacaacca tttctctaga |
| 3961 | cttcagccag acaaacctct ctccagaact cagccatatg actctctctc cagaactcag |
| 4021 | tcagacaaac ctttccccag ccctcggtca gatgcccatt tctccagacc tcagccatac |
| 4081 | aaccctttct ctagacttca gccagacaaa cctctctcca gaactcagtc aaacaaacct |
| 4141 | ttccccagcc ctcggtcaga tgcccctttc tccagacccc agccatacaa ccctttctct |
| 4201 | agacctcagc cagacaaacc tctctccaga actcagtcag acaaaccttt ccccagacct |
| 4261 | cagtgagatg cccctctttg cagatctcag tcaaattccc cttaccccag acctcgacca |
| 4321 | gatgacactt tctccagacc ttggtgagac agatctttcc ccaaactttg gtcagatgtc |
| 4381 | cctttcccca gacctcagcc aggtgactct ctctccagac atcagtgaca ccacccttct |
| 4441 | cccggatctc agccagatat cacctcctcc agaccttgat cagatattct acccttctga |
| 4501 | atctagtcag tcattgcttc ttcaagaatt taatgagtct tttccttatc cagaccttgg |
| 4561 | tcagatgcca tctccttcat ctcctactct caatgatact tttctatcaa aggaatttaa |
| 4621 | tccactggtt atagtgggcc tcagtaaaga tggtacagat tacattgaga tcattccaaa |
| 4681 | ggaagaggtc cagagcagtg aagatgacta tgctgaaatt gattatgtgc cctatgatga |
| 4741 | cccctacaaa actgatgtta ggacaaacat caactcctcc agagatcctg acaacattgc |
| 4801 | agcatggtac ctccgcagca acaatggaaa cagaagaaat tattacattg ctgctgaaga |
| 4861 | aatatcctgg gattattcag aatttgtaca aagggaaaca gatattgaag actctgatga |
| 4921 | tattccagaa gataccacat ataagaaagt agtttttcga aagtacctcg acagcacttt |
| 4981 | taccaaacgt gatcctcgag gggagtatga agagcatctc ggaattcttg gtcctattat |
| 5041 | cagagctgaa gtggatgatg ttatccaagt tcgttttaaa aatttagcat ccagaccgta |
| 5101 | ttctctacat gcccatggac tttcctatga aaaatcatca gagggaaaga cttatgaaga |
| 5161 | tgactctcct gaatggttta aggaagataa tgctgttcag ccaaatagca gttataccta |
| 5221 | cgtatggcat gccactgagc gatcagggcc agaaagtcct ggctctgcct gtcgggcttg |
| 5281 | ggcctactac tcagctgtga acccagaaaa agatattcac tcaggcttga taggtcccct |
| 5341 | cctaatctgc caaaaaggaa tactacataa ggacagcaac atgcctgtgg acatgagaga |
| 5401 | atttgtctta ctatttatga cctttgatga aaagaagagc tggtactatg aaaagaagtc |
| 5461 | ccgaagttct tggagactca catcctcaga aatgaaaaaa tcccatgagt ttcacgccat |
| 5521 | taatgggatg atctacagct tgcctggcct gaaaatgtat gagcaagagt gggtgaggtt |
| 5581 | acacctgctg aacataggcg gctcccaaga cattcacgtg gttcactttc acggccagac |
| 5641 | cttgctggaa aatggcaata aacagcacca gttaggggtc tggccccttc tgcctggttc |
| 5701 | atttaaaact cttgaaatga aggcatcaaa acctggctgg tggctcctaa acacagaggt |
| 5761 | tggagaaaac cagagagcag ggatgcaaac gccatttctt atcatggaca gagactgtag |
| 5821 | gatgccaatg ggactaagca ctggtatcat atctgattca cagatcaagg cttcagagtt |
| 5881 | tctgggttac tgggagccca gattagcaag attaaacaat ggtggatctt ataatgcttg |
| 5941 | gagtgtagaa aaacttgcag cagaatttgc ctctaaacct tggatccagg tggacatgca |
| 6001 | aaaggaagtc ataatcacag ggatccagac ccaaggtgcc aaacactacc tgaagtcctg |
| 6061 | ctataccaca gagttctatg tagcttacag ttccaaccag atcaactggc agatcttcaa |
| 6121 | agggaacagc acaaggaatg tgatgtattt taatggcaat tcagatgcct ctacaataaa |
| 6181 | agagaatcag tttgacccac ctattgtggc tagatatatt aggatctctc caactcgagc |
| 6241 | ctataacaga cctacccttc gattggaact gcaaggttgt gaggtaaatg gatgttccac |
| 6301 | acccctgggt atggaaaatg gaaagataga aaacaagcaa atcacagctt cttcgtttaa |
| 6361 | gaaatcttgg tggggagatt actgggaacc cttccgtgcc cgtctgaatg cccagggacg |
| 6421 | tgtgaatgcc tggcaagcca aggcaaacaa caataagcag tggctagaaa ttgatctact |
| 6481 | caagatcaag aagataacgg caattataac acagggctgc aagtctctgt cctctgaaat |
| 6541 | gtatgtaaag agctatacca tccactacag tgagcaggga gtggaatgga aaccatacag |
| 6601 | gctgaaatcc tccatggtgg acaagatttt tgaaggaaat actaatacca aaggacatgt |
| 6661 | gaagaacttt ttcaaccccc caatcatttc caggtttatc cgtgtcattc ctaaaacatg |
| 6721 | gaatcaaagt attgcacttc gcctggaact ctttggctgt gatatttact agaattgaac |
| 6781 | attcaaaaac ccctggaaga gactctttaa gacctcaaac catttagaat gggcaatgta |
| 6841 | ttttacgctg tgttaaatgt taacagtttt ccactatttc tctttctttt ctattagtga |
| 6901 | ataaaatttt atac |

Homo sapiens coagulation factor II (thrombin) (F2), mRNA.
ACCESSION NM_000506
VERSION NM_000506.2 GI: 5922005

(SEQ ID NO: 2478)

MAHVRGLQLPGCLALAALCSLVHSQHVFLAPQQARSLLQRVRRANTFLEEVRKGNLERECVEETCSYEEAFEALE
SSTATDVFWAKYTACETARTPRDKLAACLEGNCAEGLGTNYRGHVNITRSGIECQLWRSRYPHKPEINSTTHPGA
DLQENFCRNPDSSTTGPWCYTTDPTVRRQECSIPVCGQDQVTVAMTPRSEGSSVNLSPPLEQCVPDRGQQYQGRL
AVTTHGLPCLAWASAQAKALSKHQDFNSAVQLVENFCRNPDGDEEGVWCYVAGKPGDFGYCDLNYCEEAVEEETG
DGLDEDSDRAIEGRTATSEYQTFFNPRTFGSGEADCGLRPLFEKKSLEDKTERELLESYIDGRIVEGSDAEIGMS
PWQVMLFRKSPQELLCGASLISDRWVLTAAHCLLYPPWDKNFTENDLLVRIGKHSRTRYERNIEKISMLEKIYIH
PRYNWRENLDRDIALMKLKKPVAFSDYIHPVCLPDRETAASLLQAGYKGRVTGWGNLKETWTANVGKGQPSVLQV
VNLPIVERPVCKDSTRIRITDNMFCAGYKPDEGKRGDACEGDSGGPFVMKSPFNNRWYQMGIVSWGEGCDRDGKY
GFYTHVFRLKKWIQKVIDQFGE″

(SEQ ID NO: 2479)

| | |
|---|---|
| 1 | aattcctcag tgacccagga gctgacacac tatggcgcac gtccgaggct tgcagctgcc |
| 61 | tggctgcctg gccctggctg ccctgtgtag ccttgtgcac agccagcatg tgttcctggc |
| 121 | tcctcagcaa gcacggtcgc tgctccagcg ggtccggcga gccaacacct tcttggagga |
| 181 | ggtgcgcaag ggcaacctag agcgagagtg cgtggaggag acgtgcagct acgaggaggc |
| 241 | cttcgaggct ctggagtcct ccacggctac ggatgtgttc tgggccaagt acacagcttg |
| 301 | tgagacagcg aggacgcctc gagataagct tgctgcatgt ctggaaggta actgtgctga |
| 361 | gggtctgggt acgaactacc gagggcatgt gaacatcacc cggtcaggca ttgagtgcca |
| 421 | gctatggagg agtcgctacc cacataagcc tgaaatcaac tccactaccc atcctggggc |
| 481 | cgacctacag gagaatttct gccgcaaccc cgacagcagc accacgggac cctggtgcta |
| 541 | cactacagac cccaccgtga ggaggcagga atgcagcatc cctgtctgtg gccaggatca |
| 601 | agtcactgta gcgatgactc cacgctccga aggctccagt gtgaatctgt cacctccatt |
| 661 | ggagcagtgt gtccctgatc gggggcagca gtaccagggg cgcctggcgg tgaccacaca |
| 721 | tgggctcccc tgcctggcct gggccagcgc acaggccaag gccctgagca agcaccagga |
| 781 | cttcaactca gctgtgcagc tggtggagaa cttctgccgc aacccagacg gggatgagga |
| 841 | gggcgtgtgg tgctatgtgg ccgggaagcc tggcgacttt gggtactgcg acctcaacta |
| 901 | ttgtgaggag gccgtggagg aggagacagg agatgggctg gatgaggact cagacagggc |
| 961 | catcgaaggg cgtaccgcca ccagtgagta ccagactttc ttcaatccga ggacctttgg |
| 1021 | ctcgggagag gcagactgtg ggctgcgacc tctgttcgag aagaagtcgc tggaggacaa |
| 1081 | aaccgaaaga gagctcctgg aatcctacat cgacgggcgc attgtggagg gctcggatgc |
| 1141 | agagatcggc atgtcacctt ggcaggtgat gcttttccgg aagagtcccc aggagctgct |
| 1201 | gtgtggggcc agcctcatca gtgaccgctg ggtcctcacc gccgcccact gcctcctgta |
| 1261 | cccgccctgg gacaagaact tcaccgagaa tgaccttctg gtgcgcattg gcaagcactc |
| 1321 | ccgcacaagg tacgagcgaa acattgaaaa gatatccatg ttggaaaaga tctacatcca |
| 1381 | ccccaggtac aactggcggg agaacctgga ccgggacatt gccctgatga agctgaagaa |
| 1441 | gcctgttgcc ttcagtgact acattcaccc tgtgtgtctg cccgacaggg agacggcagc |
| 1501 | cagcttgctc caggctggat acaaggggcg ggtgacaggc tggggcaacc tgaaggagac |
| 1561 | gtggacagcc aacgttggta aggggcagcc cagtgtcctg caggtggtga acctgcccat |
| 1621 | tgtggagcgg ccggtctgca aggactccac ccggatccgc atcactgaca acatgttctg |
| 1681 | tgctggttac aagcctgatg aagggaaacg aggggatgcc tgtgaaggtg acagtggggg |
| 1741 | accctttgtc atgaagagcc cctttaacaa ccgctggtat caaatgggca tcgtctcatg |
| 1801 | gggtgaaggc tgtgaccggg atgggaaata tggcttctac acacatgtgt tccgcctgaa |
| 1861 | gaagtggata cagaaggtca ttgatcagtt tggagagtag gggccactca tattctgggc |
| 1921 | tcctggaacc aatcccgtga aagaattatt tttgtgtttc taaaactatg gttcccaata |
| 1981 | aaagtgactc tcagcgg |

TABLE 6

```
Ala Pro Pro Arg Leu Ile Cys Asp Ser Arg Val Leu Glu Arg Tyr Leu
    1 5 10 15
Leu Glu Ala Lys Glu Ala Glu Asn Ile Thr Thr Gly Cys Ala Glu His
                          20 25 30
Cys Ser Leu Asn Glu Asn Ile Thr Val Pro Asp Thr Lys Val Asn Phe
                  35 40 45
Tyr Ala Trp Lys Arg Met Glu Val Gly Gln Gln Ala Val Glu Val Trp
          50 55 60
Gln Gly Leu Ala Leu Leu Ser Glu Ala Val Leu Arg Gly Gln Ala Leu
  65 70 75 80
Leu Val Asn Ser Ser Gln Pro Trp Glu Pro Leu Gln Leu His Val Asp
                                  85 90 95
Lys Ala Val Ser Gly Leu Arg Ser Leu Thr Thr Leu Leu Arg Ala Leu
                        100 105 110
Gly Ala Gln Lys Glu Ala Ile Ser Pro Pro Asp Ala Ala Ser Ala Ala
                115 120 125
Pro Leu Arg Thr Ile Thr Ala Asp Thr Phe Arg Lys Leu Phe Arg Val
        130 135 140
Tyr Ser Asn Phe Leu Arg Gly Lys Leu Lys Leu Tyr Thr Gly Glu Ala
145 150 155 160
Cys Arg Thr Gly Asp (SEQ ID NO: 2480)
Ala Pro Pro Arg Leu Ile Cys Asp Ser Arg Val Leu Glu Arg Tyr Leu
    1 5 10 15
Leu Glu Ala Lys Glu Ala Glu Asn Ile Thr Thr Gly Cys Ala Glu His
                          20 25 30
Cys Ser Leu Asn Glu Asn Ile Thr Val Pro Asp Thr Lys Val Asn Phe
                  35 40 45
Tyr Ala Trp Lys Arg Met Glu Val Gly Gln Gln Ala Val Glu Val Trp
          50 55 60
Gln Gly Leu Ala Leu Leu Ser Glu Ala Val Leu Arg Gly Gln Ala Leu
  65 70 75 80
Leu Val Asn Ser Ser Gln Pro Trp Glu Pro Leu Gln Leu His Val Asp
                                  85 90 95
Lys Ala Val Ser Gly Leu Arg Ser Leu Thr Thr Leu Leu Arg Ala Leu
                        100 105 110
Gly Ala Gln Lys Glu Ala Ile Ser Pro Pro Asp Ala Ala Ser Ala Ala
                115 120 125
Pro Leu Arg Thr Ile Thr Ala Asp Thr Phe Arg Lys Leu Phe Arg Val
        130 135 140
Tyr Ser Asn Phe Leu Arg Gly Lys Leu Lys Leu Tyr Thr Gly Glu Ala
145 150 155 160
Cys Arg Thr Gly Asp Arg (SEQ ID NO: 2481)
                                165
```

TABLE 7

(SEQ ID NOS: 2482-4747, respectively,
in order of appearance)

N(Asparagine) as major constituent
Oligonucleotides of peptide motifs containing 3-7 amino acid
residues with N(Asparagine) as the major constituent and
T(Threonine) as the minor constituent
AAY-AAY-ACN, ACN-AAY-AAY, AAY-ACN-AAY, AAY-AAY-AAY-ACN, ACN-
AAY-AAY-AAY, AAY-ACN-AAY-AAY, AAY-AAY-ACN-AAY, AAY-AAY-AAY-
AAY-ACN, ACN-AAY-AAY-AAY-AAY, AAY-ACN-AAY-AAY-AAY, AAY-AAY-
ACN-AAY-AAY, AAY-AAY-AAY-ACN-AAY, AAY-AAY-AAY-ACN-ACN, ACN-
ACN-AAY-AAY-AAY, ACN-AAY-ACN-AAY-AAY, ACN-AAY-AAY-ACN-AAY,
ACN-AAY-AAY-AAY-ACN, AAY-ACN-ACN-AAY-AAY, AAY-ACN-AAY-ACN-
AAY, AAY-ACN-AAY-AAY-ACN, AAY-AAY-ACN-ACN-AAY, AAY-AAY-ACN-
AAY-ACN, AAY-AAY-AAY-AAY-AAY-ACN, ACN-AAY-AAY-AAY-AAY-AAY,
AAY-ACN-AAY-AAY-AAY-AAY, AAY-AAY-ACN-AAY-AAY-AAY, AAY-AAY-
AAY-ACN-AAY-AAY, AAY-AAY-AAY-AAY-ACN-AAY, AAY-AAY-AAY-AAY-
ACN-ACN, ACN-ACN-AAY-AAY-AAY-AAY, ACN-AAY-ACN-AAY-AAY-AAY,
ACN-AAY-AAY-ACN-AAY-AAY, ACN-AAY-AAY-AAY-ACN-AAY, ACN-AAY-
AAY-AAY-AAY-ACN, AAY-ACN-ACN-AAY-AAY-AAY, AAY-ACN-AAY-ACN-
AAY-AAY, AAY-ACN-AAY-AAY-ACN-AAY, AAY-ACN-AAY-AAY-AAY-ACN,
AAY-AAY-ACN-ACN-AAY-AAY, AAY-AAY-ACN-AAY-ACN-AAY, AAY-AAY-
ACN-AAY-AAY-ACN, AAY-AAY-AAY-ACN-ACN-AAY, AAY-AAY-AAY-ACN-
AAY-ACN, AAY-AAY-AAY-AAY-ACN-ACN-ACN, ACN-ACN-ACN-AAY-AAY-
AY-ACN-ACN-AAY-AAY-AAY, ACN-AAY-ACN-AAY-ACN-
AAY-AAY, ACN-AAY-ACN-AAY-AAY-ACN-AAY, ACN-AAY-ACN-AAY-AAY-
AAY-ACN, ACN-AAY-AAY-ACN-ACN-AAY-AAY, ACN-AAY-AAY-ACN-AAY-
ACN-AAY, ACN-AAY-AAY-ACN-AAY-AAY-ACN, ACN-AAY-AAY-AAY-ACN-
AAY-ACN, ACN-AAY-AAY-AAY-ACN-ACN-AAY, ACN-AAY-AAY-AAY-AAY-
ACN-ACN, ACN-ACN-AAY-ACN-AAY-AAY-AAY, ACN-ACN-AAY-AAY-ACN-
AAY-AAY, ACN-ACN-AAY-AAY-AAY-ACN-AAY, ACN-ACN-AAY-AAY-AAY-
AAY-ACN, AAY-ACN-ACN-ACN-AAY-AAY-AAY, AAY-ACN-ACN-AAY-ACN-
AAY-AAY, AAY-ACN-ACN-AAY-AAY-ACN-AAY, AAY-ACN-ACN-AAY-AAY-
AAY-ACN, AAY-ACN-AAY-ACN-ACN-AAY-AAY, AAY-ACN-AAY-AAY-ACN-
ACN-AAY, AAY-ACN-AAY-AAY-AAY-ACN-ACN, AAY-ACN-AAY-ACN-AAY-
ACN-AAY, AAY-ACN-AAY-ACN-AAY-AAY-ACN, AAY-ACN-AAY-AAY-ACN-
AAY-ACN, AAY-AAY-ACN-ACN-ACN-AAY-AAY, AAY-AAY-ACN-ACN-AAY-
ACN-AAY, AAY-AAY-ACN-ACN-AAY-AAY-ACN, AAY-AAY-ACN-AAY-ACN-
ACN-AAY, AAY-AAY-ACN-AAY-ACN-AAY-ACN, AAY-AAY-ACN-AAY-AAY-
ACN-ACN, AAY-AAY-AAY-ACN-ACN-ACN-AAY, AAY-AAY-AAY-ACN-ACN-
AAY-ACN, AAY-AAY-AAY-ACN-AAY-ACN-ACN, AAY-AAY-AAY-AAY-AAY-
ACN-ACN, ACN-ACN-AAY-AAY-AAY-AAY-AAY, ACN-AAY-ACN-AAY-AAY-
AAY-AAY, ACN-AAY-AAY-ACN-AAY-AAY-AAY, ACN-AAY-AAY-AAY-ACN-
AAY-AAY, ACN-AAY-AAY-AAY-AAY-ACN-AAY, ACN-AAY-AAY-AAY-AAY-
AAY-ACN, AAY-ACN-ACN-AAY-AAY-AAY-AAY, AAY-ACN-AAY-ACN-AAY-
AAY-AAY, AAY-ACN-AAY-AAY-ACN-AAY-AAY, AAY-ACN-AAY-AAY-AAY-
ACN-AAY, AAY-ACN-AAY-AAY-AAY-AAY-ACN, AAY-AAY-ACN-ACN-AAY-
AAY-AAY, AAY-AAY-ACN-AAY-ACN-AAY-AAY, AAY-AAY-ACN-AAY-AAY-
ACN-AAY, AAY-AAY-ACN-AAY-AAY-AAY-ACN, AAY-AAY-AAY-ACN-ACN-
AAY-AAY, AAY-AAY-AAY-ACN-AAY-ACN-AAY, AAY-AAY-AAY-ACN-AAY-
AAY-ACN, AAY-AAY-AAY-AAY-ACN-ACN-AAY, AAY-AAY-AAY-AAY-ACN-
AAY-ACN, AAY-AAY-AAY-AAY-AAY-AAY-ACN, ACN-AAY-AAY-AAY-AAY-
AAY-AAY, AAY-ACN-AAY-AAY-AAY-AAY-AAY, AAY-AAY-ACN-AAY-AAY-
AAY-AAY, AAY-AAY-AAY-ACN-AAY-AAY-AAY, AAY-AAY-AAY-AAY-ACN-
AAY-AAY, AAY-AAY-AAY-AAY-AAY-ACN-AAY
Oligonucleotides of peptide motifs containing 3-7 amino acid
residues with N(Asparagine) as the major constituent and
A(Alanine) as the minor constituent
AAY-AAY-GCN, GCN-AAY-AAY, AAY-GCN-AAY, AAY-AAY-AAY-GCN, GCN-
AAY-AAY-AAY, AAY-GCN-AAY-AAY, AAY-AAY-GCN-AAY, AAY-AAY-AAY-
AAY-GCN, GCN-AAY-AAY-AAY-AAY, AAY-GCN-AAY-AAY-AAY, AAY-AAY-
GCN-AAY-AAY, AAY-AAY-AAY-GCN-AAY, AAY-AAY-AAY-GCN-GCN, GCN-
GCN-AAY-AAY-AAY, GCN-AAY-GCN-AAY-AAY, GCN-AAY-AAY-GCN-AAY,
GCN-AAY-AAY-AAY-GCN, AAY-GCN-GCN-AAY-AAY, AAY-GCN-AAY-GCN-
AAY, AAY-GCN-AAY-AAY-GCN, AAY-AAY-GCN-GCN-AAY, AAY-AAY-GCN-
AAY-GCN, AAY-AAY-AAY-AAY-AAY-GCN, GCN-AAY-AAY-AAY-AAY-AAY,
AAY-GCN-AAY-AAY-AAY-AAY, AAY-AAY-GCN-AAY-AAY-AAY, AAY-AAY-
AAY-GCN-AAY-AAY, AAY-AAY-AAY-AAY-GCN-AAY, AAY-AAY-AAY-AAY-
GCN-GCN, GCN-GCN-AAY-AAY-AAY-AAY, GCN-AAY-GCN-AAY-AAY-AAY,
GCN-AAY-AAY-GCN-AAY-AAY, GCN-AAY-AAY-AAY-GCN-AAY, GCN-AAY-
AAY-AAY-AAY-GCN, AAY-GCN-GCN-AAY-AAY-AAY, AAY-GCN-AAY-GCN-
AAY-AAY, AAY-GCN-AAY-AAY-GCN-AAY, AAY-GCN-AAY-AAY-AAY-GCN,
AAY-AAY-GCN-GCN-AAY-AAY, AAY-AAY-GCN-AAY-GCN-AAY, AAY-AAY-
GCN-AAY-AAY-GCN, AAY-AAY-AAY-GCN-GCN-AAY, AAY-AAY-AAY-GCN-
AAY-GCN, AAY-AAY-AAY-AAY-GCN-GCN-GCN, GCN-GCN-GCN-AAY-AAY-
AAY-AAY, GCN-AAY-GCN-GCN-AAY-AAY-AAY, GCN-AAY-GCN-AAY-GCN-
AAY-AAY, GCN-AAY-GCN-AAY-AAY-GCN-AAY, GCN-AAY-GCN-AAY-AAY-
AAY-GCN, GCN-AAY-AAY-GCN-GCN-AAY-AAY, GCN-AAY-AAY-GCN-AAY-
GCN-AAY, GCN-AAY-AAY-GCN-AAY-AAY-GCN, GCN-AAY-AAY-AAY-GCN-
AAY-GCN, GCN-AAY-AAY-AAY-GCN-GCN-AAY, GCN-AAY-AAY-AAY-AAY-
GCN-GCN, GCN-GCN-AAY-GCN-AAY-AAY-AAY, GCN-GCN-AAY-AAY-GCN-
AAY-AAY, GCN-GCN-AAY-AAY-AAY-GCN-AAY, GCN-GCN-AAY-AAY-AAY-
AAY-GCN, AAY-GCN-GCN-GCN-AAY-AAY-AAY, AAY-GCN-GCN-AAY-GCN-
AAY-AAY, AAY-GCN-GCN-AAY-AAY-GCN-AAY, AAY-GCN-GCN-AAY-AAY-
AAY-GCN, AAY-GCN-AAY-GCN-GCN-AAY-AAY, AAY-GCN-AAY-AAY-GCN-
GCN-AAY, AAY-GCN-AAY-AAY-AAY-GCN-GCN, AAY-GCN-AAY-GCN-AAY-
GCN-AAY, AAY-GCN-AAY-GCN-AAY-AAY-GCN, AAY-GCN-AAY-AAY-GCN-
AAY-GCN, AAY-AAY-GCN-GCN-GCN-AAY-AAY, AAY-AAY-GCN-GCN-AAY-
GCN-AAY, AAY-AAY-GCN-GCN-AAY-AAY-GCN, AAY-AAY-GCN-AAY-GCN-
GCN-AAY, AAY-AAY-GCN-AAY-GCN-AAY-GCN, AAY-AAY-GCN-AAY-AAY-
GCN-GCN, AAY-AAY-AAY-GCN-GCN-GCN-AAY, AAY-AAY-AAY-GCN-GCN-
AAY-GCN, AAY-AAY-AAY-GCN-AAY-GCN-GCN, AAY-AAY-AAY-AAY-AAY-
GCN-GCN, GCN-GCN-AAY-AAY-AAY-AAY-AAY, GCN-AAY-GCN-AAY-AAY-
AAY-AAY, GCN-AAY-AAY-GCN-AAY-AAY-AAY, GCN-AAY-AAY-AAY-GCN-
AAY-AAY, GCN-AAY-AAY-AAY-AAY-GCN-AAY, GCN-AAY-AAY-AAY-AAY-
AAY-GCN, AAY-GCN-GCN-AAY-AAY-AAY-AAY, AAY-GCN-AAY-GCN-AAY-
AAY-AAY, AAY-GCN-AAY-AAY-GCN-AAY-AAY, AAY-GCN-AAY-AAY-AAY-
GCN-AAY, AAY-GCN-AAY-AAY-AAY-AAY-GCN, AAY-AAY-GCN-GCN-AAY-
AAY-AAY, AAY-AAY-GCN-AAY-GCN-AAY-AAY, AAY-AAY-GCN-AAY-AAY-
GCN-AAY, AAY-AAY-GCN-AAY-AAY-AAY-GCN, AAY-AAY-AAY-GCN-GCN-
AAY-AAY, AAY-AAY-AAY-GCN-AAY-GCN-AAY, AAY-AAY-AAY-GCN-AAY-
AAY-GCN, AAY-AAY-AAY-AAY-GCN-GCN-AAY, AAY-AAY-AAY-AAY-GCN-
AAY-GCN-AAY-AAY-AAY-AAY-AAY-AAY-GCN, GCN-AAY-AAY-AAY-AAY-
AAY-AAY, AAY-GCN-AAY-AAY-AAY-AAY-AAY, AAY-AAY-GCN-AAY-AAY-
AAY-AAY, AAY-AAY-AAY-GCN-AAY-AAY-AAY, AAY-AAY-AAY-AAY-GCN-
AAY-AAY, AAY-AAY-AAY-AAY-AAY-GCN-AAY
Oligonucleotides of peptide motifs containing 3-7 amino acid
residues with N(Asparagine) as the major constituent and
S(Serine) as the minor constituent
AAY-AAY-AGY, AGY-AAY-AAY, AAY-AGY-AAY, AAY-AAY-AAY-AGY, AGY-
AAY-AAY-AAY, AAY-AGY-AAY-AAY, AAY-AAY-AGY-AAY, AAY-AAY-AAY-
AAY-AGY, AGY-AAY-AAY-AAY-AAY, AAY-AGY-AAY-AAY-AAY, AAY-AAY-
AGY-AAY-AAY, AAY-AAY-AAY-AGY-AAY, AAY-AAY-AAY-AGY-AGY, AGY-
AGY-AAY-AAY-AAY, AGY-AAY-AGY-AAY-AAY, AGY-AAY-AAY-AGY-AAY,
AGY-AAY-AAY-AAY-AGY, AAY-AGY-AGY-AAY-AAY, AAY-AGY-AAY-AGY-
AAY, AAY-AGY-AAY-AAY-AGY, AAY-AAY-AGY-AGY-AAY, AAY-AAY-AGY-
AAY-AGY, AAY-AAY-AAY-AAY-AAY-AGY, AGY-AAY-AAY-AAY-AAY-AAY,
AAY-AGY-AAY-AAY-AAY-AAY, AAY-AAY-AGY-AAY-AAY-AAY, AAY-AAY-
AAY-AGY-AAY-AAY, AAY-AAY-AAY-AAY-AGY-AAY, AAY-AAY-AAY-AAY-
AGY-AGY, AGY-AGY-AAY-AAY-AAY-AAY, AGY-AAY-AGY-AAY-AAY-AAY,
AGY-AAY-AAY-AGY-AAY-AAY, AGY-AAY-AAY-AAY-AGY-AAY, AGY-AAY-
AAY-AAY-AAY-AGY, AAY-AGY-AGY-AAY-AAY-AAY, AAY-AGY-AAY-AGY-
AAY-AAY, AAY-AGY-AAY-AAY-AGY-AAY, AAY-AGY-AAY-AAY-AAY-AGY,
AAY-AAY-AGY-AGY-AAY-AAY, AAY-AAY-AGY-AAY-AGY-AAY, AAY-AAY-
AGY-AAY-AAY-AGY, AAY-AAY-AAY-AGY-AGY-AAY, AAY-AAY-AAY-AGY-
AAY-AGY, AAY-AAY-AAY-AAY-AGY-AGY-AGY, AGY-AGY-AGY-AAY-AAY-
AAY-AAY, AGY-AAY-AGY-AGY-AAY-AAY-AAY, AGY-AAY-AGY-AAY-AGY-
AAY-AAY, AGY-AAY-AGY-AAY-AAY-AGY-AAY, AGY-AAY-AGY-AAY-AAY-
AAY-AGY, AGY-AAY-AAY-AGY-AGY-AAY-AAY, AGY-AAY-AAY-AGY-AAY-
AGY-AAY, AGY-AAY-AAY-AGY-AAY-AAY-AGY, AGY-AAY-AAY-AAY-AGY-
AAY-AGY, AGY-AAY-AAY-AAY-AGY-AGY-AAY, AGY-AAY-AAY-AAY-AAY-
AGY-AGY, AGY-AGY-AAY-AGY-AAY-AAY-AAY, AGY-AGY-AAY-AAY-AGY-
AAY-AAY, AGY-AGY-AAY-AAY-AAY-AGY-AAY, AGY-AGY-AAY-AAY-AAY-
AAY-AGY, AAY-AGY-AGY-AGY-AAY-AAY-AAY, AAY-AGY-AGY-AAY-AGY-
AAY-AAY, AAY-AGY-AGY-AAY-AAY-AGY-AAY, AAY-AGY-AGY-AAY-AAY-
AAY-AGY, AAY-AGY-AAY-AGY-AGY-AAY-AAY, AAY-AGY-AAY-AAY-AGY-
AGY-AAY, AAY-AGY-AAY-AAY-AAY-AGY-AGY, AAY-AGY-AAY-AGY-AAY-
AGY-AAY, AAY-AGY-AAY-AGY-AAY-AAY-AGY, AAY-AGY-AAY-AAY-AGY-
AAY-AGY, AAY-AAY-AGY-AGY-AGY-AAY-AAY, AAY-AAY-AGY-AGY-AAY-
AGY-AAY, AAY-AAY-AGY-AGY-AAY-AAY-AGY, AAY-AAY-AGY-AAY-AGY-
AGY-AAY, AAY-AAY-AGY-AAY-AGY-AAY-AGY, AAY-AAY-AGY-AAY-AAY-
AGY-AGY, AAY-AAY-AAY-AGY-AGY-AGY-AAY, AAY-AAY-AAY-AGY-AGY-
AAY-AGY, AAY-AAY-AAY-AGY-AAY-AGY-AGY, AAY-AAY-AAY-AAY-AAY-
AGY-AGY, AGY-AGY-AAY-AAY-AAY-AAY-AAY, AGY-AAY-AGY-AAY-AAY-
AAY-AAY, AGY-AAY-AAY-AGY-AAY-AAY-AAY, AGY-AAY-AAY-AAY-AGY-
AAY-AAY, AGY-AAY-AAY-AAY-AAY-AGY-AAY, AGY-AAY-AAY-AAY-AAY-
AAY-AGY, AAY-AGY-AGY-AAY-AAY-AAY-AAY, AAY-AGY-AAY-AGY-AAY-
AAY-AAY, AAY-AGY-AAY-AAY-AGY-AAY-AAY, AAY-AGY-AAY-AAY-AAY-
AGY-AAY, AAY-AGY-AAY-AAY-AAY-AAY-AGY, AAY-AAY-AGY-AGY-AAY-
AAY-AAY, AAY-AAY-AGY-AAY-AGY-AAY-AAY, AAY-AAY-AGY-AAY-AAY-
AGY-AAY, AAY-AAY-AGY-AAY-AAY-AAY-AGY, AAY-AAY-AAY-AGY-AGY-
AAY-AAY, AAY-AAY-AAY-AGY-AAY-AGY-AAY, AAY-AAY-AAY-AGY-AAY-
AAY-AGY, AAY-AAY-AAY-AAY-AGY-AGY-AAY, AAY-AAY-AAY-AAY-AGY-
AAY-AGY-AAY-AAY-AAY-AAY-AAY-AAY-AGY, AGY-AAY-AAY-AAY-AAY-
AAY-AAY, AAY-AGY-AAY-AAY-AAY-AAY-AAY, AAY-AAY-AGY-AAY-AAY-
AAY-AAY, AAY-AAY-AAY-AGY-AAY-AAY-AAY, AAY-AAY-AAY-AAY-AGY-
AAY-AAY, AAY-AAY-AAY-AAY-AAY-AGY-AAY
Oligonucleotides of peptide motifs containing 3-7 amino acid
residues with N(Asparagine) as the major constituent and
Q(Glutamine) as the minor constituent
AAY-AAY-CAR, CAR-AAY-AAY, AAY-CAR-AAY, AAY-AAY-AAY-CAR, CAR-
AAY-AAY-AAY, AAY-CAR-AAY-AAY, AAY-AAY-CAR-AAY, AAY-AAY-AAY-
AAY-CAR, CAR-AAY-AAY-AAY-AAY, AAY-CAR-AAY-AAY-AAY, AAY-AAY-
CAR-AAY-AAY, AAY-AAY-AAY-CAR-AAY, AAY-AAY-AAY-CAR-CAR, CAR-
CAR-AAY-AAY-AAY, CAR-AAY-CAR-AAY-AAY, CAR-AAY-AAY-CAR-AAY,
CAR-AAY-AAY-AAY-CAR, AAY-CAR-CAR-AAY-AAY, AAY-CAR-AAY-CAR-
AAY, AAY-CAR-AAY-AAY-CAR, AAY-AAY-CAR-CAR-AAY, AAY-AAY-CAR-
AAY-CAR, AAY-AAY-AAY-AAY-AAY-CAR, CAR-AAY-AAY-AAY-AAY-AAY,
AAY-CAR-AAY-AAY-AAY-AAY, AAY-AAY-CAR-AAY-AAY-AAY, AAY-AAY-
AAY-CAR-AAY-AAY, AAY-AAY-AAY-AAY-CAR-AAY, AAY-AAY-AAY-AAY-
CAR-CAR, CAR-CAR-AAY-AAY-AAY-AAY, CAR-AAY-CAR-AAY-AAY-AAY,
CAR-AAY-AAY-CAR-AAY-AAY, CAR-AAY-AAY-AAY-CAR-AAY, CAR-AAY-
AAY-AAY-AAY-CAR, AAY-CAR-CAR-AAY-AAY-AAY, AAY-CAR-AAY-CAR-
AAY-AAY, AAY-CAR-AAY-AAY-CAR-AAY, AAY-CAR-AAY-AAY-AAY-CAR,
AAY-AAY-CAR-CAR-AAY-AAY, AAY-AAY-CAR-AAY-CAR-AAY, AAY-AAY-
CAR-AAY-AAY-CAR, AAY-AAY-AAY-CAR-CAR-AAY, AAY-AAY-AAY-CAR-
AAY-CAR, AAY-AAY-AAY-AAY-CAR-CAR-CAR, CAR-CAR-CAR-AAY-AAY-
AAY-AAY, CAR-AAY-CAR-CAR-AAY-AAY-AAY, CAR-AAY-CAR-AAY-CAR-
AAY-AAY, CAR-AAY-CAR-AAY-AAY-CAR-AAY, CAR-AAY-CAR-AAY-AAY-
AAY-CAR, CAR-AAY-AAY-CAR-CAR-AAY-AAY, CAR-AAY-AAY-CAR-AAY-
CAR-AAY, CAR-AAY-AAY-CAR-AAY-AAY-CAR, CAR-AAY-AAY-AAY-CAR-
AAY-CAR, CAR-AAY-AAY-AAY-CAR-CAR-AAY, CAR-AAY-AAY-AAY-AAY-
CAR-CAR, CAR-CAR-AAY-CAR-AAY-AAY-AAY, CAR-CAR-AAY-AAY-CAR-
AAY-AAY, CAR-CAR-AAY-AAY-AAY-CAR-AAY, CAR-CAR-AAY-AAY-AAY-
AAY-CAR, AAY-CAR-CAR-CAR-AAY-AAY-AAY, AAY-CAR-CAR-AAY-CAR-
AAY-AAY, AAY-CAR-CAR-AAY-AAY-CAR-AAY, AAY-CAR-CAR-AAY-AAY-
AAY-CAR, AAY-CAR-AAY-CAR-CAR-AAY-AAY, AAY-CAR-AAY-AAY-CAR-
CAR-AAY, AAY-CAR-AAY-AAY-AAY-CAR-CAR, AAY-CAR-AAY-CAR-AAY-
CAR-AAY, AAY-CAR-AAY-CAR-AAY-AAY-CAR, AAY-CAR-AAY-AAY-CAR-
AAY-CAR, AAY-AAY-CAR-CAR-CAR-AAY-AAY, AAY-AAY-CAR-CAR-AAY-
CAR-AAY, AAY-AAY-CAR-CAR-AAY-AAY-CAR, AAY-AAY-CAR-AAY-CAR-
CAR-AAY, AAY-AAY-CAR-AAY-CAR-AAY-CAR, AAY-AAY-CAR-AAY-AAY-
CAR-CAR, AAY-AAY-AAY-CAR-CAR-CAR-AAY, AAY-AAY-AAY-CAR-CAR-
AAY-CAR, AAY-AAY-AAY-CAR-AAY-CAR-CAR, AAY-AAY-AAY-AAY-AAY-
CAR-CAR, CAR-CAR-AAY-AAY-AAY-AAY-AAY, CAR-AAY-CAR-AAY-AAY-
AAY-AAY, CAR-AAY-AAY-CAR-AAY-AAY-AAY, CAR-AAY-AAY-AAY-CAR-
AAY-AAY, CAR-AAY-AAY-AAY-AAY-CAR-AAY, CAR-AAY-AAY-AAY-AAY-
AAY-CAR, AAY-CAR-CAR-AAY-AAY-AAY-AAY, AAY-CAR-AAY-CAR-AAY-
AAY-AAY, AAY-CAR-AAY-AAY-CAR-AAY-AAY, AAY-CAR-AAY-AAY-AAY-
CAR-AAY, AAY-CAR-AAY-AAY-AAY-AAY-CAR, AAY-AAY-CAR-CAR-AAY-
AAY-AAY, AAY-AAY-CAR-AAY-CAR-AAY-AAY, AAY-AAY-CAR-AAY-AAY-
CAR-AAY, AAY-AAY-CAR-AAY-AAY-AAY-CAR, AAY-AAY-AAY-CAR-CAR-
AAY-AAY, AAY-AAY-AAY-CAR-AAY-CAR-AAY, AAY-AAY-AAY-CAR-AAY-
AAY-CAR, AAY-AAY-AAY-AAY-CAR-CAR-AAY, AAY-AAY-AAY-AAY-CAR-
AAY-CAR-AAY-AAY-AAY-AAY-AAY-AAY-CAR, CAR-AAY-AAY-AAY-AAY-
AAY-AAY, AAY-CAR-AAY-AAY-AAY-AAY-AAY, AAY-AAY-CAR-AAY-AAY-
AAY-AAY, AAY-AAY-AAY-CAR-AAY-AAY-AAY, AAY-AAY-AAY-AAY-CAR-
AAY-AAY, AAY-AAY-AAY-AAY-AAY-CAR-AAY
Oligonucleotides of peptide motifs containing 3-7 amino acid
residues with N(Asparagine) as the major constituent and
E(Glutamic Acid) as the minor constituent
AAY-AAY-GAR, GAR-AAY-AAY, AAY-GAR-AAY, AAY-AAY-AAY-GAR, GAR-
AAY-AAY-AAY, AAY-GAR-AAY-AAY, AAY-AAY-GAR-AAY, AAY-AAY-AAY-
AAY-GAR, GAR-AAY-AAY-AAY-AAY, AAY-GAR-AAY-AAY-AAY, AAY-AAY-
GAR-AAY-AAY, AAY-AAY-AAY-GAR-AAY, AAY-AAY-AAY-GAR-GAR, GAR-
GAR-AAY-AAY-AAY, GAR-AAY-GAR-AAY-AAY, GAR-AAY-AAY-GAR-AAY,
GAR-AAY-AAY-AAY-GAR, AAY-GAR-GAR-AAY-AAY, AAY-GAR-AAY-GAR-
AAY, AAY-GAR-AAY-AAY-GAR, AAY-AAY-GAR-GAR-AAY, AAY-AAY-GAR-
AAY-GAR, AAY-AAY-AAY-AAY-AAY-GAR, GAR-AAY-AAY-AAY-AAY-AAY,
AAY-GAR-AAY-AAY-AAY-AAY, AAY-AAY-GAR-AAY-AAY-AAY, AAY-AAY-
AAY-GAR-AAY-AAY, AAY-AAY-AAY-AAY-GAR-AAY, AAY-AAY-AAY-AAY-
GAR-GAR, GAR-GAR-AAY-AAY-AAY-AAY, GAR-AAY-GAR-AAY-AAY-AAY,
GAR-AAY-AAY-GAR-AAY-AAY, GAR-AAY-AAY-AAY-GAR-AAY, GAR-AAY-
AAY-AAY-AAY-GAR, AAY-GAR-GAR-AAY-AAY-AAY, AAY-GAR-AAY-GAR-
AAY-AAY, AAY-GAR-AAY-AAY-GAR-AAY, AAY-GAR-AAY-AAY-AAY-GAR,
AAY-AAY-GAR-GAR-AAY-AAY, AAY-AAY-GAR-AAY-GAR-AAY, AAY-AAY-
GAR-AAY-AAY-GAR, AAY-AAY-AAY-GAR-GAR-AAY, AAY-AAY-AAY-GAR-
AAY-GAR, AAY-AAY-AAY-AAY-GAR-GAR-GAR, GAR-GAR-GAR-AAY-AAY-
AAY-AAY, GAR-AAY-GAR-GAR-AAY-AAY-AAY, GAR-AAY-GAR-AAY-GAR-
AAY-AAY, GAR-AAY-GAR-AAY-AAY-GAR-AAY, GAR-AAY-GAR-AAY-AAY-
AAY-GAR, GAR-AAY-AAY-GAR-GAR-AAY-AAY, GAR-AAY-AAY-GAR-AAY-
GAR-AAY, GAR-AAY-AAY-GAR-AAY-AAY-GAR, GAR-AAY-AAY-AAY-GAR-
AAY-GAR, GAR-AAY-AAY-AAY-GAR-GAR-AAY, GAR-AAY-AAY-AAY-AAY-
GAR-GAR, GAR-GAR-AAY-GAR-AAY-AAY-AAY, GAR-GAR-AAY-AAY-GAR-
AAY-AAY, GAR-GAR-AAY-AAY-AAY-GAR-AAY, GAR-GAR-AAY-AAY-AAY-
AAY-GAR, AAY-GAR-GAR-GAR-AAY-AAY-AAY, AAY-GAR-GAR-AAY-GAR-
AAY-AAY, AAY-GAR-GAR-AAY-AAY-GAR-AAY, AAY-GAR-GAR-AAY-AAY-
AAY-GAR, AAY-GAR-AAY-GAR-GAR-AAY-AAY, AAY-GAR-AAY-AAY-GAR-
GAR-AAY, AAY-GAR-AAY-AAY-AAY-GAR-GAR, AAY-GAR-AAY-GAR-AAY-
GAR-AAY, AAY-GAR-AAY-GAR-AAY-AAY-GAR, AAY-GAR-AAY-AAY-GAR-
AAY-GAR, AAY-AAY-GAR-GAR-GAR-AAY-AAY, AAY-AAY-GAR-GAR-AAY-
GAR-AAY, AAY-AAY-GAR-GAR-AAY-AAY-GAR, AAY-AAY-GAR-AAY-GAR-
GAR-AAY, AAY-AAY-GAR-AAY-GAR-AAY-GAR, AAY-AAY-GAR-AAY-AAY-
GAR-GAR, AAY-AAY-AAY-GAR-GAR-GAR-AAY, AAY-AAY-AAY-GAR-GAR-
AAY-GAR, AAY-AAY-AAY-GAR-AAY-GAR-GAR, AAY-AAY-AAY-AAY-AAY-
GAR-GAR, GAR-GAR-AAY-AAY-AAY-AAY-AAY, GAR-AAY-GAR-AAY-AAY-
AAY-AAY, GAR-AAY-AAY-GAR-AAY-AAY-AAY, GAR-AAY-AAY-AAY-GAR-
AAY-AAY, GAR-AAY-AAY-AAY-AAY-GAR-AAY, GAR-AAY-AAY-AAY-AAY-
AAY-GAR, AAY-GAR-GAR-AAY-AAY-AAY-AAY, AAY-GAR-AAY-GAR-AAY-
AAY-AAY, AAY-GAR-AAY-AAY-GAR-AAY-AAY, AAY-GAR-AAY-AAY-AAY-
GAR-AAY, AAY-GAR-AAY-AAY-AAY-AAY-GAR, AAY-AAY-GAR-GAR-AAY-
AAY-AAY, AAY-AAY-GAR-AAY-GAR-AAY-AAY, AAY-AAY-GAR-AAY-AAY-
GAR-AAY, AAY-AAY-GAR-AAY-AAY-AAY-GAR, AAY-AAY-AAY-GAR-GAR-
AAY-AAY, AAY-AAY-AAY-GAR-AAY-GAR-AAY, AAY-AAY-AAY-GAR-AAY-
AAY-GAR, AAY-AAY-AAY-AAY-GAR-GAR-AAY, AAY-AAY-AAY-AAY-GAR-
AAY-GAR-AAY-AAY-AAY-AAY-AAY-AAY-GAR, GAR-AAY-AAY-AAY-AAY-
AAY-AAY, AAY-GAR-AAY-AAY-AAY-AAY-AAY, AAY-AAY-GAR-AAY-AAY-
AAY-AAY, AAY-AAY-AAY-GAR-AAY-AAY-AAY, AAY-AAY-AAY-AAY-GAR-
AAY-AAY, AAY-AAY-AAY-AAY-AAY-GAR-AAY
Oligonucleotides of peptide motifs containing 3-7 amino acid
residues with N(Asparagine) as the major constituent and
H(Histidine) as the minor constituent
AAY-AAY-CAY, CAY-AAY-AAY, AAY-CAY-AAY, AAY-AAY-AAY-CAY, CAY-
AAY-AAY-AAY, AAY-CAY-AAY-AAY, AAY-AAY-CAY-AAY, AAY-AAY-AAY-
AAY-CAY, CAY-AAY-AAY-AAY-AAY, AAY-CAY-AAY-AAY-AAY, AAY-AAY-
CAY-AAY-AAY, AAY-AAY-AAY-CAY-AAY, AAY-AAY-AAY-CAY-CAY, CAY-
CAY-AAY-AAY-AAY, CAY-AAY-CAY-AAY-AAY, CAY-AAY-AAY-CAY-AAY,
CAY-AAY-AAY-AAY-CAY, AAY-CAY-CAY-AAY-AAY, AAY-CAY-AAY-CAY-
AAY, AAY-CAY-AAY-AAY-CAY, AAY-AAY-CAY-CAY-AAY, AAY-AAY-CAY-
AAY-CAY, AAY-AAY-AAY-AAY-AAY-CAY, CAY-AAY-AAY-AAY-AAY-AAY,
AAY-CAY-AAY-AAY-AAY-AAY, AAY-AAY-CAY-AAY-AAY-AAY, AAY-AAY-
AAY-CAY-AAY-AAY, AAY-AAY-AAY-AAY-CAY-AAY, AAY-AAY-AAY-AAY-
CAY-CAY, CAY-CAY-AAY-AAY-AAY-AAY, CAY-AAY-CAY-AAY-AAY-AAY,
CAY-AAY-AAY-CAY-AAY-AAY, CAY-AAY-AAY-AAY-CAY-AAY, CAY-AAY-
AAY-AAY-AAY-CAY, AAY-CAY-CAY-AAY-AAY-AAY, AAY-CAY-AAY-CAY-
AAY-AAY, AAY-CAY-AAY-AAY-CAY-AAY, AAY-CAY-AAY-AAY-AAY-CAY,
AAY-AAY-CAY-CAY-AAY-AAY, AAY-AAY-CAY-AAY-CAY-AAY, AAY-AAY-
CAY-AAY-AAY-CAY, AAY-AAY-AAY-CAY-CAY-AAY, AAY-AAY-AAY-CAY-
AAY-CAY, AAY-AAY-AAY-AAY-CAY-CAY-CAY, CAY-CAY-CAY-AAY-AAY-
AAY-AAY, CAY-AAY-CAY-CAY-AAY-AAY-AAY, CAY-AAY-CAY-AAY-CAY-
AAY-AAY, CAY-AAY-CAY-AAY-AAY-CAY-AAY, CAY-AAY-CAY-AAY-AAY-
AAY-CAY, CAY-AAY-AAY-CAY-CAY-AAY-AAY, CAY-AAY-AAY-CAY-AAY-
CAY-AAY, CAY-AAY-AAY-CAY-AAY-AAY-CAY, CAY-AAY-AAY-AAY-CAY-
AAY-CAY, CAY-AAY-AAY-AAY-CAY-CAY-AAY, CAY-AAY-AAY-AAY-AAY-
CAY-CAY, CAY-CAY-AAY-CAY-AAY-AAY-AAY, CAY-CAY-AAY-AAY-CAY-
AAY-AAY, CAY-CAY-AAY-AAY-AAY-CAY-AAY, CAY-CAY-AAY-AAY-AAY-
AAY-CAY, AAY-CAY-CAY-CAY-AAY-AAY-AAY, AAY-CAY-CAY-AAY-CAY-
AAY-AAY, AAY-CAY-CAY-AAY-AAY-CAY-AAY, AAY-CAY-CAY-AAY-AAY-
AAY-CAY, AAY-CAY-AAY-CAY-CAY-AAY-AAY, AAY-CAY-AAY-AAY-CAY-
CAY-AAY, AAY-CAY-AAY-AAY-AAY-CAY-CAY, AAY-CAY-AAY-CAY-AAY-
CAY-AAY, AAY-CAY-AAY-CAY-AAY-AAY-CAY, AAY-CAY-AAY-AAY-CAY-
AAY-CAY, AAY-AAY-CAY-CAY-CAY-AAY-AAY, AAY-AAY-CAY-CAY-AAY-
CAY-AAY, AAY-AAY-CAY-CAY-AAY-AAY-CAY, AAY-AAY-CAY-AAY-CAY-
CAY-AAY, AAY-AAY-CAY-AAY-CAY-AAY-CAY, AAY-AAY-CAY-AAY-AAY-
CAY-CAY, AAY-AAY-AAY-CAY-CAY-CAY-AAY, AAY-AAY-AAY-CAY-CAY-
AAY-CAY, AAY-AAY-AAY-CAY-AAY-CAY-CAY, AAY-AAY-AAY-AAY-AAY-
CAY-CAY, CAY-CAY-AAY-AAY-AAY-AAY-AAY, CAY-AAY-CAY-AAY-AAY-
AAY-AAY, CAY-AAY-AAY-CAY-AAY-AAY-AAY, CAY-AAY-AAY-AAY-CAY-
AAY-AAY, CAY-AAY-AAY-AAY-AAY-CAY-AAY, CAY-AAY-AAY-AAY-AAY-
AAY-CAY, AAY-CAY-CAY-AAY-AAY-AAY-AAY, AAY-CAY-AAY-CAY-AAY-
AAY-AAY, AAY-CAY-AAY-AAY-CAY-AAY-AAY, AAY-CAY-AAY-AAY-AAY-
CAY-AAY, AAY-CAY-AAY-AAY-AAY-AAY-CAY, AAY-AAY-CAY-CAY-AAY-
AAY-AAY, AAY-AAY-CAY-AAY-CAY-AAY-AAY, AAY-AAY-CAY-AAY-AAY-
CAY-AAY, AAY-AAY-CAY-AAY-AAY-AAY-CAY, AAY-AAY-AAY-CAY-CAY-
AAY-AAY, AAY-AAY-AAY-CAY-AAY-CAY-AAY, AAY-AAY-AAY-CAY-AAY-
AAY-CAY, AAY-AAY-AAY-AAY-CAY-CAY-AAY, AAY-AAY-AAY-AAY-CAY-
AAY-CAY-AAY-AAY-AAY-AAY-AAY-AAY-CAY, CAY-AAY-AAY-AAY-AAY-
AAY-AAY, AAY-CAY-AAY-AAY-AAY-AAY-AAY, AAY-AAY-CAY-AAY-AAY-
AAY-AAY, AAY-AAY-AAY-CAY-AAY-AAY-AAY, AAY-AAY-AAY-AAY-CAY-
AAY-AAY, AAY-AAY-AAY-AAY-AAY-CAY-AAY
Oligonucleotides of peptide motifs containing 3-7 amino acid
residues with N(Asparagine) as the major constituent and
D(Aspartic Acid) as the minor constituent
AAY-AAY-GAY, GAY-AAY-AAY, AAY-GAY-AAY, AAY-AAY-AAY-GAY, GAY-
AAY-AAY-AAY, AAY-GAY-AAY-AAY, AAY-AAY-GAY-AAY, AAY-AAY-AAY-
AAY-GAY, GAY-AAY-AAY-AAY-AAY, AAY-GAY-AAY-AAY-AAY, AAY-AAY-
GAY-AAY-AAY, AAY-AAY-AAY-GAY-AAY, AAY-AAY-AAY-GAY-GAY, GAY-
GAY-AAY-AAY-AAY, GAY-AAY-GAY-AAY-AAY, GAY-AAY-AAY-GAY-AAY,
GAY-AAY-AAY-AAY-GAY, AAY-GAY-GAY-AAY-AAY, AAY-GAY-AAY-GAY-
AAY, AAY-GAY-AAY-AAY-GAY, AAY-AAY-GAY-GAY-AAY, AAY-AAY-GAY-
AAY-GAY, AAY-AAY-AAY-AAY-AAY-GAY, GAY-AAY-AAY-AAY-AAY-AAY,
AAY-GAY-AAY-AAY-AAY-AAY, AAY-AAY-GAY-AAY-AAY-AAY, AAY-AAY-
AAY-GAY-AAY-AAY, AAY-AAY-AAY-AAY-GAY-AAY, AAY-AAY-AAY-AAY-
GAY-GAY, GAY-GAY-AAY-AAY-AAY-AAY, GAY-AAY-GAY-AAY-AAY-AAY,
GAY-AAY-AAY-GAY-AAY-AAY, GAY-AAY-AAY-AAY-GAY-AAY, GAY-AAY-
AAY-AAY-AAY-GAY, AAY-GAY-GAY-AAY-AAY-AAY, AAY-GAY-AAY-GAY-
AAY-AAY, AAY-GAY-AAY-AAY-GAY-AAY, AAY-GAY-AAY-AAY-AAY-GAY,
AAY-AAY-GAY-GAY-AAY-AAY, AAY-AAY-GAY-AAY-GAY-AAY, AAY-AAY-
GAY-AAY-AAY-GAY, AAY-AAY-AAY-GAY-GAY-AAY, AAY-AAY-AAY-GAY-
AAY-GAY, AAY-AAY-AAY-AAY-GAY-GAY-GAY, GAY-GAY-GAY-AAY-AAY-
AAY-AAY, GAY-AAY-GAY-GAY-AAY-AAY-AAY, GAY-AAY-GAY-AAY-GAY-
AAY-AAY, GAY-AAY-GAY-AAY-AAY-GAY-AAY, GAY-AAY-GAY-AAY-AAY-
AAY-GAY, GAY-AAY-AAY-GAY-GAY-AAY-AAY, GAY-AAY-AAY-GAY-AAY-
GAY-AAY, GAY-AAY-AAY-GAY-AAY-AAY-GAY, GAY-AAY-AAY-AAY-GAY-
AAY-GAY, GAY-AAY-AAY-AAY-GAY-GAY-AAY, GAY-AAY-AAY-AAY-AAY-
GAY-GAY, GAY-GAY-AAY-GAY-AAY-AAY-AAY, GAY-GAY-AAY-AAY-GAY-
AAY-AAY, GAY-GAY-AAY-AAY-AAY-GAY-AAY, GAY-GAY-AAY-AAY-AAY-
AAY-GAY, AAY-GAY-GAY-GAY-AAY-AAY-AAY, AAY-GAY-GAY-AAY-GAY-
AAY-AAY, AAY-GAY-GAY-AAY-AAY-GAY-AAY, AAY-GAY-GAY-AAY-AAY-
AAY-GAY, AAY-GAY-AAY-GAY-GAY-AAY-AAY, AAY-GAY-AAY-AAY-GAY-
GAY-AAY, AAY-GAY-AAY-AAY-AAY-GAY-GAY, AAY-GAY-AAY-GAY-AAY-
GAY-AAY, AAY-GAY-AAY-GAY-AAY-AAY-GAY, AAY-GAY-AAY-AAY-GAY-
AAY-GAY, AAY-AAY-GAY-GAY-GAY-AAY-AAY, AAY-AAY-GAY-GAY-AAY-
GAY-AAY, AAY-AAY-GAY-GAY-AAY-AAY-GAY, AAY-AAY-GAY-AAY-GAY-
GAY-AAY, AAY-AAY-GAY-AAY-GAY-AAY-GAY, AAY-AAY-GAY-AAY-AAY-
GAY-GAY, AAY-AAY-AAY-GAY-GAY-GAY-AAY, AAY-AAY-AAY-GAY-GAY-
AAY-GAY, AAY-AAY-AAY-GAY-AAY-GAY-GAY, AAY-AAY-AAY-AAY-AAY-
GAY-GAY, GAY-GAY-AAY-AAY-AAY-AAY-AAY, GAY-AAY-GAY-AAY-AAY-
AAY-AAY, GAY-AAY-AAY-GAY-AAY-AAY-AAY, GAY-AAY-AAY-AAY-GAY-
AAY-AAY, GAY-AAY-AAY-AAY-AAY-GAY-AAY, GAY-AAY-AAY-AAY-AAY-
AAY-GAY, AAY-GAY-GAY-AAY-AAY-AAY-AAY, AAY-GAY-AAY-GAY-AAY-
AAY-AAY, AAY-GAY-AAY-AAY-GAY-AAY-AAY, AAY-GAY-AAY-AAY-AAY-
GAY-AAY, AAY-GAY-AAY-AAY-AAY-AAY-GAY, AAY-AAY-GAY-GAY-AAY-
AAY-AAY, AAY-AAY-GAY-AAY-GAY-AAY-AAY, AAY-AAY-GAY-AAY-AAY-
GAY-AAY, AAY-AAY-GAY-AAY-AAY-AAY-GAY, AAY-AAY-AAY-GAY-GAY-
AAY-AAY, AAY-AAY-AAY-GAY-AAY-GAY-AAY, AAY-AAY-AAY-GAY-AAY-
AAY-GAY, AAY-AAY-AAY-AAY-GAY-GAY-AAY, AAY-AAY-AAY-AAY-GAY-
AAY-GAY-AAY-AAY-AAY-AAY-AAY-AAY-GAY, GAY-AAY-AAY-AAY-AAY-
AAY-AAY, AAY-GAY-AAY-AAY-AAY-AAY-AAY, AAY-AAY-GAY-AAY-AAY-
AAY-AAY, AAY-AAY-AAY-GAY-AAY-AAY-AAY, AAY-AAY-AAY-AAY-GAY-
AAY-AAY, AAY-AAY-AAY-AAY-AAY-GAY-AAY
Oligonucleotides of peptide motifs containing 3-7 amino
acide residues with G (glycine) as the major constituent and
T(Threonine) as the minor constituent
GGN-GGN-ACN, ACN-GGN-GGN, GGN-ACN-GGN, GGN-GGN-GGN-ACN, ACN-
GGN-GGN-GGN, GGN-ACN-GGN-GGN, GGN-GGN-ACN-GGN, GGN-GGN-GGN-
GGN-ACN, ACN-GGN-GGN-GGN-GGN, GGN-ACN-GGN-GGN-GGN, GGN-GGN-
ACN-GGN-GGN, GGN-GGN-GGN-ACN-GGN, GGN-GGN-GGN-ACN-ACN, ACN-
ACN-GGN-GGN-GGN, ACN-GGN-ACN-GGN-GGN, ACN-GGN-GGN-ACN-GGN,
ACN-GGN-GGN-GGN-ACN, GGN-ACN-ACN-GGN-GGN, GGN-ACN-GGN-ACN-
GGN, GGN-ACN-GGN-GGN-ACN, GGN-GGN-ACN-ACN-GGN, GGN-GGN-ACN-
GGN-ACN, GGN-GGN-GGN-GGN-GGN-ACN, ACN-GGN-GGN-GGN-GGN-GGN,
GGN-ACN-GGN-GGN-GGN-GGN, GGN-GGN-ACN-GGN-GGN-GGN, GGN-GGN-
GGN-ACN-GGN-GGN, GGN-GGN-GGN-GGN-ACN-GGN, GGN-GGN-GGN-GGN-
ACN-ACN, ACN-ACN-GGN-GGN-GGN-GGN, ACN-GGN-ACN-GGN-GGN-GGN,
ACN-GGN-GGN-ACN-GGN-GGN, ACN-GGN-GGN-GGN-ACN-GGN, ACN-GGN-
GGN-GGN-GGN-ACN, GGN-ACN-ACN-GGN-GGN-GGN, GGN-ACN-GGN-ACN-
GGN-GGN, GGN-ACN-GGN-GGN-ACN-GGN, GGN-ACN-GGN-GGN-GGN-ACN,
GGN-GGN-ACN-ACN-GGN-GGN, GGN-GGN-ACN-GGN-ACN-GGN, GGN-GGN-
ACN-GGN-GGN-ACN, GGN-GGN-GGN-ACN-ACN-GGN, GGN-GGN-GGN-ACN-
GGN-ACN, GGN-GGN-GGN-GGN-ACN-ACN-ACN, ACN-ACN-ACN-GGN-GGN-
GGN-GGN, ACN-GGN-ACN-ACN-GGN-GGN-GGN, ACN-GGN-ACN-GGN-ACN-
GGN-GGN, ACN-GGN-ACN-GGN-GGN-ACN-GGN, ACN-GGN-ACN-GGN-GGN-
GGN-ACN, ACN-GGN-GGN-ACN-ACN-GGN-GGN, ACN-GGN-GGN-ACN-GGN-
ACN-GGN, ACN-GGN-GGN-ACN-GGN-GGN-ACN, ACN-GGN-GGN-GGN-ACN-
GGN-ACN, ACN-GGN-GGN-GGN-ACN-ACN-GGN, ACN-GGN-GGN-GGN-GGN-
ACN-ACN, ACN-ACN-GGN-ACN-GGN-GGN-GGN, ACN-ACN-GGN-GGN-ACN-
GGN-GGN, ACN-ACN-GGN-GGN-GGN-ACN-GGN, ACN-ACN-GGN-GGN-GGN-
GGN-ACN, GGN-ACN-ACN-ACN-GGN-GGN-GGN, GGN-ACN-ACN-GGN-ACN-
GGN-GGN, GGN-ACN-ACN-GGN-GGN-ACN-GGN, GGN-ACN-ACN-GGN-GGN-
GGN-ACN, GGN-ACN-GGN-ACN-ACN-GGN-GGN, GGN-ACN-GGN-GGN-ACN-
ACN-GGN, GGN-ACN-GGN-GGN-GGN-ACN-ACN, GGN-ACN-GGN-ACN-GGN-
ACN-GGN, GGN-ACN-GGN-ACN-GGN-GGN-ACN, GGN-ACN-GGN-GGN-ACN-
GGN-ACN, GGN-GGN-ACN-ACN-ACN-GGN-GGN, GGN-GGN-ACN-ACN-GGN-
ACN-GGN, GGN-GGN-ACN-ACN-GGN-GGN-ACN, GGN-GGN-ACN-GGN-ACN-
ACN-GGN, GGN-GGN-ACN-GGN-ACN-GGN-ACN, GGN-GGN-ACN-GGN-GGN-
ACN-ACN, GGN-GGN-GGN-ACN-ACN-ACN-GGN, GGN-GGN-GGN-ACN-ACN-
GGN-ACN, GGN-GGN-GGN-ACN-GGN-ACN-ACN, GGN-GGN-GGN-GGN-GGN-
ACN-ACN, ACN-ACN-GGN-GGN-GGN-GGN-GGN, ACN-GGN-ACN-GGN-GGN-
GGN-GGN, ACN-GGN-GGN-ACN-GGN-GGN-GGN, ACN-GGN-GGN-GGN-ACN-
GGN-GGN, ACN-GGN-GGN-GGN-GGN-ACN-GGN, ACN-GGN-GGN-GGN-GGN-
GGN-ACN, GGN-ACN-ACN-GGN-GGN-GGN-GGN, GGN-ACN-GGN-ACN-GGN-
GGN-GGN, GGN-ACN-GGN-GGN-ACN-GGN-GGN, GGN-ACN-GGN-GGN-GGN-
ACN-GGN, GGN-ACN-GGN-GGN-GGN-GGN-ACN, GGN-GGN-ACN-ACN-GGN-
GGN-GGN, GGN-GGN-ACN-GGN-ACN-GGN-GGN, GGN-GGN-ACN-GGN-GGN-
ACN-GGN, GGN-GGN-ACN-GGN-GGN-GGN-ACN, GGN-GGN-GGN-ACN-ACN-
GGN-GGN, GGN-GGN-GGN-ACN-GGN-ACN-GGN, GGN-GGN-GGN-ACN-GGN-
GGN-ACN, GGN-GGN-GGN-GGN-ACN-ACN-GGN, GGN-GGN-GGN-GGN-ACN-
GGN-ACN-GGN-GGN-GGN-GGN-GGN-GGN-ACN, ACN-GGN-GGN-GGN-GGN-
GGN-GGN, GGN-ACN-GGN-GGN-GGN-GGN-GGN, GGN-GGN-ACN-GGN-GGN-
GGN-GGN, GGN-GGN-GGN-ACN-GGN-GGN-GGN, GGN-GGN-GGN-GGN-ACN-
GGN-GGN, GGN-GGN-GGN-GGN-GGN-ACN-GGN
Oligonucleotides of peptide motifs containing 3-7 amino
acide residues with G(glycine) as the major constituent and
A(Alanine) as the minor constituent
GGN-GGN-GCN, GCN-GGN-GGN, GGN-GCN-GGN, GGN-GGN-GGN-GCN, GCN-
GGN-GGN-GGN, GGN-GCN-GGN-GGN, GGN-GGN-GCN-GGN, GGN-GGN-GGN-
GGN-GCN, GCN-GGN-GGN-GGN-GGN, GGN-GCN-GGN-GGN-GGN, GGN-GGN-
GCN-GGN-GGN, GGN-GGN-GGN-GCN-GGN, GGN-GGN-GGN-GCN-GCN, GCN-
GCN-GGN-GGN-GGN, GCN-GGN-GCN-GGN-GGN, GCN-GGN-GGN-GCN-GGN,
GCN-GGN-GGN-GGN-GCN, GGN-GCN-GCN-GGN-GGN, GGN-GCN-GGN-GCN-
GGN, GGN-GCN-GGN-GGN-GCN, GGN-GGN-GCN-GCN-GGN, GGN-GGN-GCN-
GGN-GCN, GGN-GGN-GGN-GGN-GGN-GCN, GCN-GGN-GGN-GGN-GGN-GGN,
GGN-GCN-GGN-GGN-GGN-GGN, GGN-GGN-GCN-GGN-GGN-GGN, GGN-GGN-
GGN-GCN-GGN-GGN, GGN-GGN-GGN-GGN-GCN-GGN, GGN-GGN-GGN-GGN-
GCN-GCN, GCN-GCN-GGN-GGN-GGN-GGN, GCN-GGN-GCN-GGN-GGN-GGN,
GCN-GGN-GGN-GCN-GGN-GGN, GCN-GGN-GGN-GGN-GCN-GGN, GCN-GGN-
GGN-GGN-GGN-GCN, GGN-GCN-GCN-GGN-GGN-GGN, GGN-GCN-GGN-GCN-
GGN-GGN, GGN-GCN-GGN-GGN-GCN-GGN, GGN-GCN-GGN-GGN-GGN-GCN,
GGN-GGN-GCN-GCN-GGN-GGN, GGN-GGN-GCN-GGN-GCN-GGN, GGN-GGN-
GCN-GGN-GGN-GCN, GGN-GGN-GGN-GCN-GCN-GGN, GGN-GGN-GGN-GCN-
GGN-GCN, GGN-GGN-GGN-GGN-GCN-GCN-GCN, GCN-GCN-GCN-GGN-GGN-
GGN-GGN, GCN-GGN-GCN-GCN-GGN-GGN-GGN, GCN-GGN-GCN-GGN-GCN-
GGN-GGN, GCN-GGN-GCN-GGN-GGN-GCN-GGN, GCN-GGN-GCN-GGN-GGN-
GGN-GCN, GCN-GGN-GGN-GCN-GCN-GGN-GGN, GCN-GGN-GGN-GCN-GGN-
GCN-GGN, GCN-GGN-GGN-GCN-GGN-GGN-GCN, GCN-GGN-GGN-GGN-GCN-
GGN-GCN, GCN-GGN-GGN-GGN-GCN-GCN-GGN, GCN-GGN-GGN-GGN-GGN-
GCN-GCN, GCN-GCN-GGN-GCN-GGN-GGN-GGN, GCN-GCN-GGN-GGN-GCN-
GGN-GGN, GCN-GCN-GGN-GGN-GGN-GCN-GGN, GCN-GCN-GGN-GGN-GGN-
GGN-GCN, GGN-GCN-GCN-GCN-GGN-GGN-GGN, GGN-GCN-GCN-GGN-GCN-
GGN-GGN, GGN-GCN-GCN-GGN-GGN-GCN-GGN, GGN-GCN-GCN-GGN-GGN-
GGN-GCN, GGN-GCN-GGN-GCN-GCN-GGN-GGN, GGN-GCN-GGN-GGN-GCN-
GCN-GGN, GGN-GCN-GGN-GGN-GGN-GCN-GCN, GGN-GCN-GGN-GCN-GGN-
GCN-GGN, GGN-GCN-GGN-GCN-GGN-GGN-GCN, GGN-GCN-GGN-GGN-GCN-
GGN-GCN, GGN-GGN-GCN-GCN-GCN-GGN-GGN, GGN-GGN-GCN-GCN-GGN-
GCN-GGN, GGN-GGN-GCN-GCN-GGN-GGN-GCN, GGN-GGN-GCN-GGN-GCN-
GCN-GGN, GGN-GGN-GCN-GGN-GCN-GGN-GCN, GGN-GGN-GCN-GGN-GGN-
GCN-GCN, GGN-GGN-GGN-GCN-GCN-GCN-GGN, GGN-GGN-GGN-GCN-GCN-
GGN-GCN, GGN-GGN-GGN-GCN-GGN-GCN-GCN, GGN-GGN-GGN-GGN-GGN-
GCN-GCN, GCN-GCN-GGN-GGN-GGN-GGN-GGN, GCN-GGN-GCN-GGN-GGN-
GGN-GGN, GCN-GGN-GGN-GCN-GGN-GGN-GGN, GCN-GGN-GGN-GGN-GCN-
GGN-GGN, GCN-GGN-GGN-GGN-GGN-GCN-GGN, GCN-GGN-GGN-GGN-GGN-
GGN-GCN, GGN-GCN-GCN-GGN-GGN-GGN-GGN, GGN-GCN-GGN-GCN-GGN-
GGN-GGN, GGN-GCN-GGN-GGN-GCN-GGN-GGN, GGN-GCN-GGN-GGN-GGN-
GCN-GGN, GGN-GCN-GGN-GGN-GGN-GGN-GCN, GGN-GGN-GCN-GCN-GGN-
GGN-GGN, GGN-GGN-GCN-GGN-GCN-GGN-GGN, GGN-GGN-GCN-GGN-GGN-
GCN-GGN, GGN-GGN-GCN-GGN-GGN-GGN-GCN, GGN-GGN-GGN-GCN-GCN-
GGN-GGN, GGN-GGN-GGN-GCN-GGN-GCN-GGN, GGN-GGN-GGN-GCN-GGN-
GGN-GCN, GGN-GGN-GGN-GGN-GCN-GCN-GGN, GGN-GGN-GGN-GGN-GCN-
GGN-GCN-GGN-GGN-GGN-GGN-GGN-GGN-GCN, GCN-GGN-GGN-GGN-GGN-
GGN-GGN, GGN-GCN-GGN-GGN-GGN-GGN-GGN, GGN-GGN-GCN-GGN-GGN-
GGN-GGN, GGN-GGN-GGN-GCN-GGN-GGN-GGN, GGN-GGN-GGN-GGN-GCN-
GGN-GGN, GGN-GGN-GGN-GGN-GGN-GCN-GGN
Oligonucleotides of peptide motifs containing 3-7 amino
acide residues with G(glycine) as the major constituent and
S(Serine) as the minor constituent
GGN-GGN-AGY, AGY-GGN-GGN, GGN-AGY-GGN, GGN-GGN-GGN-AGY, AGY-
GGN-GGN-GGN, GGN-AGY-GGN-GGN, GGN-GGN-AGY-GGN, GGN-GGN-GGN-
GGN-AGY, AGY-GGN-GGN-GGN-GGN, GGN-AGY-GGN-GGN-GGN, GGN-GGN-
AGY-GGN-GGN, GGN-GGN-GGN-AGY-GGN, GGN-GGN-GGN-AGY-AGY, AGY-
AGY-GGN-GGN-GGN, AGY-GGN-AGY-GGN-GGN, AGY-GGN-GGN-AGY-GGN,
AGY-GGN-GGN-GGN-AGY, GGN-AGY-AGY-GGN-GGN, GGN-AGY-GGN-AGY-
GGN, GGN-AGY-GGN-GGN-AGY, GGN-GGN-AGY-AGY-GGN, GGN-GGN-AGY-
GGN-AGY, GGN-GGN-GGN-GGN-GGN-AGY, AGY-GGN-GGN-GGN-GGN-GGN,
GGN-AGY-GGN-GGN-GGN-GGN, GGN-GGN-AGY-GGN-GGN-GGN, GGN-GGN-
GGN-AGY-GGN-GGN, GGN-GGN-GGN-GGN-AGY-GGN, GGN-GGN-GGN-GGN-
AGY-AGY, AGY-AGY-GGN-GGN-GGN-GGN, AGY-GGN-AGY-GGN-GGN-GGN,
AGY-GGN-GGN-AGY-GGN-GGN, AGY-GGN-GGN-GGN-AGY-GGN, AGY-GGN-
GGN-GGN-GGN-AGY, GGN-AGY-AGY-GGN-GGN-GGN, GGN-AGY-GGN-AGY-
GGN-GGN, GGN-AGY-GGN-GGN-AGY-GGN, GGN-AGY-GGN-GGN-GGN-AGY,
GGN-GGN-AGY-AGY-GGN-GGN, GGN-GGN-AGY-GGN-AGY-GGN, GGN-GGN-
AGY-GGN-GGN-AGY, GGN-GGN-GGN-AGY-AGY-GGN, GGN-GGN-GGN-AGY-
GGN-AGY, GGN-GGN-GGN-GGN-AGY-AGY-AGY, AGY-AGY-AGY-GGN-GGN-
GGN-GGN, AGY-GGN-AGY-AGY-GGN-GGN-GGN, AGY-GGN-AGY-GGN-AGY-
GGN-GGN, AGY-GGN-AGY-GGN-GGN-AGY-GGN, AGY-GGN-AGY-GGN-GGN-
GGN-AGY, AGY-GGN-GGN-AGY-AGY-GGN-GGN, AGY-GGN-GGN-AGY-GGN-
AGY-GGN, AGY-GGN-GGN-AGY-GGN-GGN-AGY, AGY-GGN-GGN-GGN-AGY-
GGN-AGY, AGY-GGN-GGN-GGN-AGY-AGY-GGN, AGY-GGN-GGN-GGN-GGN-
AGY-AGY, AGY-AGY-GGN-AGY-GGN-GGN-GGN, AGY-AGY-GGN-GGN-AGY-
GGN-GGN, AGY-AGY-GGN-GGN-GGN-AGY-GGN, AGY-AGY-GGN-GGN-GGN-
GGN-AGY, GGN-AGY-AGY-AGY-GGN-GGN-GGN, GGN-AGY-AGY-GGN-AGY-
GGN-GGN, GGN-AGY-AGY-GGN-GGN-AGY-GGN, GGN-AGY-AGY-GGN-GGN-
GGN-AGY, GGN-AGY-GGN-AGY-AGY-GGN-GGN, GGN-AGY-GGN-GGN-AGY-
AGY-GGN, GGN-AGY-GGN-GGN-GGN-AGY-AGY, GGN-AGY-GGN-AGY-GGN-
AGY-GGN, GGN-AGY-GGN-AGY-GGN-GGN-AGY, GGN-AGY-GGN-GGN-AGY-
GGN-AGY, GGN-GGN-AGY-AGY-AGY-GGN-GGN, GGN-GGN-AGY-AGY-GGN-
AGY-GGN, GGN-GGN-AGY-AGY-GGN-GGN-AGY, GGN-GGN-AGY-GGN-AGY-
AGY-GGN, GGN-GGN-AGY-GGN-AGY-GGN-AGY, GGN-GGN-AGY-GGN-GGN-
AGY-AGY, GGN-GGN-GGN-AGY-AGY-AGY-GGN, GGN-GGN-GGN-AGY-AGY-
GGN-AGY, GGN-GGN-GGN-AGY-GGN-AGY-AGY, GGN-GGN-GGN-GGN-GGN-
AGY-AGY, AGY-AGY-GGN-GGN-GGN-GGN-GGN, AGY-GGN-AGY-GGN-GGN-
GGN-GGN, AGY-GGN-GGN-AGY-GGN-GGN-GGN, AGY-GGN-GGN-GGN-AGY-
GGN-GGN, AGY-GGN-GGN-GGN-GGN-AGY-GGN, AGY-GGN-GGN-GGN-GGN-
GGN-AGY, GGN-AGY-AGY-GGN-GGN-GGN-GGN, GGN-AGY-GGN-AGY-GGN-
GGN-GGN, GGN-AGY-GGN-GGN-AGY-GGN-GGN, GGN-AGY-GGN-GGN-GGN-
AGY-GGN, GGN-AGY-GGN-GGN-GGN-GGN-AGY, GGN-GGN-AGY-AGY-GGN-
GGN-GGN, GGN-GGN-AGY-GGN-AGY-GGN-GGN, GGN-GGN-AGY-GGN-GGN-
AGY-GGN, GGN-GGN-AGY-GGN-GGN-GGN-AGY, GGN-GGN-GGN-AGY-AGY-
GGN-GGN, GGN-GGN-GGN-AGY-GGN-AGY-GGN, GGN-GGN-GGN-AGY-GGN-
GGN-AGY, GGN-GGN-GGN-GGN-AGY-AGY-GGN, GGN-GGN-GGN-GGN-AGY-
GGN-AGY-GGN-GGN-GGN-GGN-GGN-GGN-AGY, AGY-GGN-GGN-GGN-GGN-
GGN-GGN, GGN-AGY-GGN-GGN-GGN-GGN-GGN, GGN-GGN-AGY-GGN-GGN-
GGN-GGN, GGN-GGN-GGN-AGY-GGN-GGN-GGN, GGN-GGN-GGN-GGN-AGY-
GGN-GGN, GGN-GGN-GGN-GGN-GGN-AGY-GGN
Oligonucleotides of peptide motifs containing 3-7 amino
acide residues with G(glycine) as the major constituent and
Q(Glutamine) as the minor constituent
GGN-GGN-CAR, CAR-GGN-GGN, GGN-CAR-GGN, GGN-GGN-GGN-CAR, CAR-
GGN-GGN-GGN, GGN-CAR-GGN-GGN, GGN-GGN-CAR-GGN, GGN-GGN-GGN-
GGN-CAR, CAR-GGN-GGN-GGN-GGN, GGN-CAR-GGN-GGN-GGN, GGN-GGN-
CAR-GGN-GGN, GGN-GGN-GGN-CAR-GGN, GGN-GGN-GGN-CAR-CAR, CAR-
CAR-GGN-GGN-GGN, CAR-GGN-CAR-GGN-GGN, CAR-GGN-GGN-CAR-GGN,
CAR-GGN-GGN-GGN-CAR, GGN-CAR-CAR-GGN-GGN, GGN-CAR-GGN-CAR-
GGN, GGN-CAR-GGN-GGN-CAR, GGN-GGN-CAR-CAR-GGN, GGN-GGN-CAR-
GGN-CAR, GGN-GGN-GGN-GGN-GGN-CAR, CAR-GGN-GGN-GGN-GGN-GGN,
GGN-CAR-GGN-GGN-GGN-GGN, GGN-GGN-CAR-GGN-GGN-GGN, GGN-GGN-
GGN-CAR-GGN-GGN, GGN-GGN-GGN-GGN-CAR-GGN, GGN-GGN-GGN-GGN-
CAR-CAR, CAR-CAR-GGN-GGN-GGN-GGN, CAR-GGN-CAR-GGN-GGN-GGN,
CAR-GGN-GGN-CAR-GGN-GGN, CAR-GGN-GGN-GGN-CAR-GGN, CAR-GGN-
GGN-GGN-GGN-CAR, GGN-CAR-CAR-GGN-GGN-GGN, GGN-CAR-GGN-CAR-
GGN-GGN, GGN-CAR-GGN-GGN-CAR-GGN, GGN-CAR-GGN-GGN-GGN-CAR,
GGN-GGN-CAR-CAR-GGN-GGN, GGN-GGN-CAR-GGN-CAR-GGN, GGN-GGN-
CAR-GGN-GGN-CAR, GGN-GGN-GGN-CAR-CAR-GGN, GGN-GGN-GGN-CAR-
GGN-CAR, GGN-GGN-GGN-GGN-CAR-CAR-CAR, CAR-CAR-CAR-GGN-GGN-
GGN-GGN, CAR-GGN-CAR-CAR-GGN-GGN-GGN, CAR-GGN-CAR-GGN-CAR-
GGN-GGN, CAR-GGN-CAR-GGN-GGN-CAR-GGN, CAR-GGN-CAR-GGN-GGN-
GGN-CAR, CAR-GGN-GGN-CAR-CAR-GGN-GGN, CAR-GGN-GGN-CAR-GGN-
CAR-GGN, CAR-GGN-GGN-CAR-GGN-GGN-CAR, CAR-GGN-GGN-GGN-CAR-
GGN-CAR, CAR-GGN-GGN-GGN-CAR-CAR-GGN, CAR-GGN-GGN-GGN-GGN-
CAR-CAR, CAR-CAR-GGN-CAR-GGN-GGN-GGN, CAR-CAR-GGN-GGN-CAR-
GGN-GGN, CAR-CAR-GGN-GGN-GGN-CAR-GGN, CAR-CAR-GGN-GGN-GGN-
GGN-CAR, GGN-CAR-CAR-CAR-GGN-GGN-GGN, GGN-CAR-CAR-GGN-CAR-
GGN-GGN, GGN-CAR-CAR-GGN-GGN-CAR-GGN, GGN-CAR-CAR-GGN-GGN-
GGN-CAR, GGN-CAR-GGN-CAR-CAR-GGN-GGN, GGN-CAR-GGN-GGN-CAR-
CAR-GGN, GGN-CAR-GGN-GGN-GGN-CAR-CAR, GGN-CAR-GGN-CAR-GGN-
CAR-GGN, GGN-CAR-GGN-CAR-GGN-GGN-CAR, GGN-CAR-GGN-GGN-CAR-
GGN-CAR, GGN-GGN-CAR-CAR-CAR-GGN-GGN, GGN-GGN-CAR-CAR-GGN-
CAR-GGN, GGN-GGN-CAR-CAR-GGN-GGN-CAR, GGN-GGN-CAR-GGN-CAR-
CAR-GGN, GGN-GGN-CAR-GGN-CAR-GGN-CAR, GGN-GGN-CAR-GGN-GGN-
CAR-CAR, GGN-GGN-GGN-CAR-CAR-CAR-GGN, GGN-GGN-GGN-CAR-CAR-
GGN-CAR, GGN-GGN-GGN-CAR-GGN-CAR-CAR, GGN-GGN-GGN-GGN-GGN-
CAR-CAR, CAR-CAR-GGN-GGN-GGN-GGN-GGN, CAR-GGN-CAR-GGN-GGN-
GGN-GGN, CAR-GGN-GGN-CAR-GGN-GGN-GGN, CAR-GGN-GGN-GGN-CAR-
GGN-GGN, CAR-GGN-GGN-GGN-GGN-CAR-GGN, CAR-GGN-GGN-GGN-GGN-
GGN-CAR, GGN-CAR-CAR-GGN-GGN-GGN-GGN, GGN-CAR-GGN-CAR-GGN-
GGN-GGN, GGN-CAR-GGN-GGN-CAR-GGN-GGN, GGN-CAR-GGN-GGN-GGN-
CAR-GGN, GGN-CAR-GGN-GGN-GGN-GGN-CAR, GGN-GGN-CAR-CAR-GGN-
GGN-GGN, GGN-GGN-CAR-GGN-CAR-GGN-GGN, GGN-GGN-CAR-GGN-GGN-
CAR-GGN, GGN-GGN-CAR-GGN-GGN-GGN-CAR, GGN-GGN-GGN-CAR-CAR-
GGN-GGN, GGN-GGN-GGN-CAR-GGN-CAR-GGN, GGN-GGN-GGN-CAR-GGN-
GGN-CAR, GGN-GGN-GGN-GGN-CAR-CAR-GGN, GGN-GGN-GGN-GGN-CAR-
GGN-CAR-GGN-GGN-GGN-GGN-GGN-GGN-CAR, CAR-GGN-GGN-GGN-GGN-
GGN-GGN, GGN-CAR-GGN-GGN-GGN-GGN-GGN, GGN-GGN-CAR-GGN-GGN-
GGN-GGN, GGN-GGN-GGN-CAR-GGN-GGN-GGN, GGN-GGN-GGN-GGN-CAR-
GGN-GGN, GGN-GGN-GGN-GGN-GGN-CAR-GGN
Oligonucleotides of peptide motifs containing 3-7 amino
acide residues with G(glycine) as the major constituent and
E(Glutamic Acid) as the minor constituent
GGN-GGN-GAR, GAR-GGN-GGN, GGN-GAR-GGN, GGN-GGN-GGN-GAR, GAR-
GGN-GGN-GGN, GGN-GAR-GGN-GGN, GGN-GGN-GAR-GGN, GGN-GGN-GGN-
GGN-GAR, GAR-GGN-GGN-GGN-GGN, GGN-GAR-GGN-GGN-GGN, GGN-GGN-
GAR-GGN-GGN, GGN-GGN-GGN-GAR-GGN, GGN-GGN-GGN-GAR-GAR, GAR-
GAR-GGN-GGN-GGN, GAR-GGN-GAR-GGN-GGN, GAR-GGN-GGN-GAR-GGN,
GAR-GGN-GGN-GGN-GAR, GGN-GAR-GAR-GGN-GGN, GGN-GAR-GGN-GAR-
GGN, GGN-GAR-GGN-GGN-GAR, GGN-GGN-GAR-GAR-GGN, GGN-GGN-GAR-
GGN-GAR, GGN-GGN-GGN-GGN-GGN-GAR, GAR-GGN-GGN-GGN-GGN-GGN,
GGN-GAR-GGN-GGN-GGN-GGN, GGN-GGN-GAR-GGN-GGN-GGN, GGN-GGN-
GGN-GAR-GGN-GGN, GGN-GGN-GGN-GGN-GAR-GGN, GGN-GGN-GGN-GGN-
GAR-GAR, GAR-GAR-GGN-GGN-GGN-GGN, GAR-GGN-GAR-GGN-GGN-GGN,
GAR-GGN-GGN-GAR-GGN-GGN, GAR-GGN-GGN-GGN-GAR-GGN, GAR-GGN-
GGN-GGN-GGN-GAR, GGN-GAR-GAR-GGN-GGN-GGN, GGN-GAR-GGN-GAR-
GGN-GGN, GGN-GAR-GGN-GGN-GAR-GGN, GGN-GAR-GGN-GGN-GGN-GAR,
GGN-GGN-GAR-GAR-GGN-GGN, GGN-GGN-GAR-GGN-GAR-GGN, GGN-GGN-
GAR-GGN-GGN-GAR, GGN-GGN-GGN-GAR-GAR-GGN, GGN-GGN-GGN-GAR-
GGN-GAR, GGN-GGN-GGN-GGN-GAR-GAR-GAR, GAR-GAR-GAR-GGN-GGN-
GGN-GGN, GAR-GGN-GAR-GAR-GGN-GGN-GGN, GAR-GGN-GAR-GGN-GAR-
GGN-GGN, GAR-GGN-GAR-GGN-GGN-GAR-GGN, GAR-GGN-GAR-GGN-GGN-
GGN-GAR, GAR-GGN-GGN-GAR-GAR-GGN-GGN, GAR-GGN-GGN-GAR-GGN-
GAR-GGN, GAR-GGN-GGN-GAR-GGN-GGN-GAR, GAR-GGN-GGN-GGN-GAR-
GGN-GAR, GAR-GGN-GGN-GGN-GAR-GAR-GGN, GAR-GGN-GGN-GGN-GGN-
GAR-GAR, GAR-GAR-GGN-GAR-GGN-GGN-GGN, GAR-GAR-GGN-GGN-GAR-
GGN-GGN, GAR-GAR-GGN-GGN-GGN-GAR-GGN, GAR-GAR-GGN-GGN-GGN-
GGN-GAR, GGN-GAR-GAR-GAR-GGN-GGN-GGN, GGN-GAR-GAR-GGN-GAR-
GGN-GGN, GGN-GAR-GAR-GGN-GGN-GAR-GGN, GGN-GAR-GAR-GGN-GGN-
GGN-GAR, GGN-GAR-GGN-GAR-GAR-GGN-GGN, GGN-GAR-GGN-GGN-GAR-
GAR-GGN, GGN-GAR-GGN-GGN-GGN-GAR-GAR, GGN-GAR-GGN-GAR-GGN-
GAR-GGN, GGN-GAR-GGN-GAR-GGN-GGN-GAR, GGN-GAR-GGN-GGN-GAR-
GGN-GAR, GGN-GGN-GAR-GAR-GAR-GGN-GGN, GGN-GGN-GAR-GAR-GGN-
GAR-GGN, GGN-GGN-GAR-GAR-GGN-GGN-GAR, GGN-GGN-GAR-GGN-GAR-
GAR-GGN, GGN-GGN-GAR-GGN-GAR-GGN-GAR, GGN-GGN-GAR-GGN-GGN-
GAR-GAR, GGN-GGN-GGN-GAR-GAR-GAR-GGN, GGN-GGN-GGN-GAR-GAR-
GGN-GAR, GGN-GGN-GGN-GAR-GGN-GAR-GAR, GGN-GGN-GGN-GGN-GGN-
GAR-GAR, GAR-GAR-GGN-GGN-GGN-GGN-GGN, GAR-GGN-GAR-GGN-GGN-
GGN-GGN, GAR-GGN-GGN-GAR-GGN-GGN-GGN, GAR-GGN-GGN-GGN-GAR-
GGN-GGN, GAR-GGN-GGN-GGN-GGN-GAR-GGN, GAR-GGN-GGN-GGN-GGN-
GGN-GAR, GGN-GAR-GAR-GGN-GGN-GGN-GGN, GGN-GAR-GGN-GAR-GGN-
GGN-GGN, GGN-GAR-GGN-GGN-GAR-GGN-GGN, GGN-GAR-GGN-GGN-GGN-
GAR-GGN, GGN-GAR-GGN-GGN-GGN-GGN-GAR, GGN-GGN-GAR-GAR-GGN-
GGN-GGN, GGN-GGN-GAR-GGN-GAR-GGN-GGN, GGN-GGN-GAR-GGN-GGN-
GAR-GGN, GGN-GGN-GAR-GGN-GGN-GGN-GAR, GGN-GGN-GGN-GAR-GAR-
GGN-GGN, GGN-GGN-GGN-GAR-GGN-GAR-GGN, GGN-GGN-GGN-GAR-GGN-
GGN-GAR, GGN-GGN-GGN-GGN-GAR-GAR-GGN, GGN-GGN-GGN-GGN-GAR-
GGN-GAR-GGN-GGN-GGN-GGN-GGN-GGN-GAR, GAR-GGN-GGN-GGN-GGN-
GGN-GGN, GGN-GAR-GGN-GGN-GGN-GGN-GGN, GGN-GGN-GAR-GGN-GGN-
GGN-GGN, GGN-GGN-GGN-GAR-GGN-GGN-GGN, GGN-GGN-GGN-GGN-GAR-
GGN-GGN, GGN-GGN-GGN-GGN-GGN-GAR-GGN
Oligonucleotides of peptide motifs containing 3-7 amino
acide residues with G(glycine) as the major constituent and
H(Histidine) as the minor constituent
GGN-GGN-CAY, CAY-GGN-GGN, GGN-CAY-GGN, GGN-GGN-GGN-CAY, CAY-
GGN-GGN-GGN, GGN-CAY-GGN-GGN, GGN-GGN-CAY-GGN, GGN-GGN-GGN-
GGN-CAY, CAY-GGN-GGN-GGN-GGN, GGN-CAY-GGN-GGN-GGN, GGN-GGN-
CAY-GGN-GGN, GGN-GGN-GGN-CAY-GGN, GGN-GGN-GGN-CAY-CAY, CAY-
CAY-GGN-GGN-GGN, CAY-GGN-CAY-GGN-GGN, CAY-GGN-GGN-CAY-GGN,
CAY-GGN-GGN-GGN-CAY, GGN-CAY-CAY-GGN-GGN, GGN-CAY-GGN-CAY-
GGN, GGN-CAY-GGN-GGN-CAY, GGN-GGN-CAY-CAY-GGN, GGN-GGN-CAY-
GGN-CAY, GGN-GGN-GGN-GGN-GGN-CAY, CAY-GGN-GGN-GGN-GGN-GGN,
GGN-CAY-GGN-GGN-GGN-GGN, GGN-GGN-CAY-GGN-GGN-GGN, GGN-GGN-
GGN-CAY-GGN-GGN, GGN-GGN-GGN-GGN-CAY-GGN, GGN-GGN-GGN-GGN-
CAY-CAY, CAY-CAY-GGN-GGN-GGN-GGN, CAY-GGN-CAY-GGN-GGN-GGN,
CAY-GGN-GGN-CAY-GGN-GGN, CAY-GGN-GGN-GGN-CAY-GGN, CAY-GGN-
GGN-GGN-GGN-CAY, GGN-CAY-CAY-GGN-GGN-GGN, GGN-CAY-GGN-CAY-
GGN-GGN, GGN-CAY-GGN-GGN-CAY-GGN, GGN-CAY-GGN-GGN-GGN-CAY,
GGN-GGN-CAY-CAY-GGN-GGN, GGN-GGN-CAY-GGN-CAY-GGN, GGN-GGN-
CAY-GGN-GGN-CAY, GGN-GGN-GGN-CAY-CAY-GGN, GGN-GGN-GGN-CAY-
GGN-CAY, GGN-GGN-GGN-GGN-CAY-CAY-CAY, CAY-CAY-CAY-GGN-GGN-
GGN-GGN, CAY-GGN-CAY-CAY-GGN-GGN-GGN, CAY-GGN-CAY-GGN-CAY-
GGN-GGN, CAY-GGN-CAY-GGN-GGN-CAY-GGN, CAY-GGN-CAY-GGN-GGN-
GGN-CAY, CAY-GGN-GGN-CAY-CAY-GGN-GGN, CAY-GGN-GGN-CAY-GGN-
CAY-GGN, CAY-GGN-GGN-CAY-GGN-GGN-CAY, CAY-GGN-GGN-GGN-CAY-
GGN-CAY, CAY-GGN-GGN-GGN-CAY-CAY-GGN, CAY-GGN-GGN-GGN-GGN-
CAY-CAY, CAY-CAY-GGN-CAY-GGN-GGN-GGN, CAY-CAY-GGN-GGN-CAY-
GGN-GGN, CAY-CAY-GGN-GGN-GGN-CAY-GGN, CAY-CAY-GGN-GGN-GGN-
GGN-CAY, GGN-CAY-CAY-CAY-GGN-GGN-GGN, GGN-CAY-CAY-GGN-CAY-
GGN-GGN, GGN-CAY-CAY-GGN-GGN-CAY-GGN, GGN-CAY-CAY-GGN-GGN-
GGN-CAY, GGN-CAY-GGN-CAY-CAY-GGN-GGN, GGN-CAY-GGN-GGN-CAY-
CAY-GGN, GGN-CAY-GGN-GGN-GGN-CAY-CAY, GGN-CAY-GGN-CAY-GGN-
CAY-GGN, GGN-CAY-GGN-CAY-GGN-GGN-CAY, GGN-CAY-GGN-GGN-CAY-
GGN-CAY, GGN-GGN-CAY-CAY-CAY-GGN-GGN, GGN-GGN-CAY-CAY-GGN-
CAY-GGN, GGN-GGN-CAY-CAY-GGN-GGN-CAY, GGN-GGN-CAY-GGN-CAY-
CAY-GGN, GGN-GGN-CAY-GGN-CAY-GGN-CAY, GGN-GGN-CAY-GGN-GGN-
CAY-CAY, GGN-GGN-GGN-CAY-CAY-CAY-GGN, GGN-GGN-GGN-CAY-CAY-
GGN-CAY, GGN-GGN-GGN-CAY-GGN-CAY-CAY, GGN-GGN-GGN-GGN-GGN-
CAY-CAY, CAY-CAY-GGN-GGN-GGN-GGN-GGN, CAY-GGN-CAY-GGN-GGN-
GGN-GGN, CAY-GGN-GGN-CAY-GGN-GGN-GGN, CAY-GGN-GGN-GGN-CAY-
GGN-GGN, CAY-GGN-GGN-GGN-GGN-CAY-GGN, CAY-GGN-GGN-GGN-GGN-
GGN-CAY, GGN-CAY-CAY-GGN-GGN-GGN-GGN, GGN-CAY-GGN-CAY-GGN-
GGN-GGN, GGN-CAY-GGN-GGN-CAY-GGN-GGN, GGN-CAY-GGN-GGN-GGN-
CAY-GGN, GGN-CAY-GGN-GGN-GGN-GGN-CAY, GGN-GGN-CAY-CAY-GGN-
GGN-GGN, GGN-GGN-CAY-GGN-CAY-GGN-GGN, GGN-GGN-CAY-GGN-GGN-
CAY-GGN, GGN-GGN-CAY-GGN-GGN-GGN-CAY, GGN-GGN-GGN-CAY-CAY-
GGN-GGN, GGN-GGN-GGN-CAY-GGN-CAY-GGN, GGN-GGN-GGN-CAY-GGN-
GGN-CAY, GGN-GGN-GGN-GGN-CAY-CAY-GGN, GGN-GGN-GGN-GGN-CAY-
GGN-CAY-GGN-GGN-GGN-GGN-GGN-GGN-CAY, CAY-GGN-GGN-GGN-GGN-
GGN-GGN, GGN-CAY-GGN-GGN-GGN-GGN-GGN, GGN-GGN-CAY-GGN-GGN-
GGN-GGN, GGN-GGN-GGN-CAY-GGN-GGN-GGN, GGN-GGN-GGN-GGN-CAY-
GGN-GGN, GGN-GGN-GGN-GGN-GGN-CAY-GGN
Oligonucleotides of peptide motifs containing 3-7 amino
acide residues with G(glycine) as the major constituent and
N(Asparagine) as the minor constituent
GGN-GGN-AAY, AAY-GGN-GGN, GGN-AAY-GGN, GGN-GGN-GGN-AAY, AAY-
GGN-GGN-GGN, GGN-AAY-GGN-GGN, GGN-GGN-AAY-GGN, GGN-GGN-GGN-
GGN-AAY, AAY-GGN-GGN-GGN-GGN, GGN-AAY-GGN-GGN-GGN, GGN-GGN-
AAY-GGN-GGN, GGN-GGN-GGN-AAY-GGN, GGN-GGN-GGN-AAY-AAY, AAY-
AAY-GGN-GGN-GGN, AAY-GGN-AAY-GGN-GGN, AAY-GGN-GGN-AAY-GGN,
AAY-GGN-GGN-GGN-AAY, GGN-AAY-AAY-GGN-GGN, GGN-AAY-GGN-AAY-
GGN, GGN-AAY-GGN-GGN-AAY, GGN-GGN-AAY-AAY-GGN, GGN-GGN-AAY-
GGN-AAY, GGN-GGN-GGN-GGN-GGN-AAY, AAY-GGN-GGN-GGN-GGN-GGN,
GGN-AAY-GGN-GGN-GGN-GGN, GGN-GGN-AAY-GGN-GGN-GGN, GGN-GGN-
GGN-AAY-GGN-GGN, GGN-GGN-GGN-GGN-AAY-GGN, GGN-GGN-GGN-GGN-
AAY-AAY, AAY-AAY-GGN-GGN-GGN-GGN, AAY-GGN-AAY-GGN-GGN-GGN,
AAY-GGN-GGN-AAY-GGN-GGN, AAY-GGN-GGN-GGN-AAY-GGN, AAY-GGN-
GGN-GGN-GGN-AAY, GGN-AAY-AAY-GGN-GGN-GGN, GGN-AAY-GGN-AAY-
GGN-GGN, GGN-AAY-GGN-GGN-AAY-GGN, GGN-AAY-GGN-GGN-GGN-AAY,
GGN-GGN-AAY-AAY-GGN-GGN, GGN-GGN-AAY-GGN-AAY-GGN, GGN-GGN-
AAY-GGN-GGN-AAY, GGN-GGN-GGN-AAY-AAY-GGN, GGN-GGN-GGN-AAY-
GGN-AAY, GGN-GGN-GGN-GGN-AAY-AAY-AAY, AAY-AAY-AAY-GGN-GGN-
GGN-GGN, AAY-GGN-AAY-AAY-GGN-GGN-GGN, AAY-GGN-AAY-GGN-AAY-
GGN-GGN, AAY-GGN-AAY-GGN-GGN-AAY-GGN, AAY-GGN-AAY-GGN-GGN-
GGN-AAY, AAY-GGN-GGN-AAY-AAY-GGN-GGN, AAY-GGN-GGN-AAY-GGN-
AAY-GGN, AAY-GGN-GGN-AAY-GGN-GGN-AAY, AAY-GGN-GGN-GGN-AAY-
GGN-AAY, AAY-GGN-GGN-GGN-AAY-AAY-GGN, AAY-GGN-GGN-GGN-GGN-
AAY-AAY, AAY-AAY-GGN-AAY-GGN-GGN-GGN, AAY-AAY-GGN-GGN-AAY-
GGN-GGN, AAY-AAY-GGN-GGN-GGN-AAY-GGN, AAY-AAY-GGN-GGN-GGN-
GGN-AAY, GGN-AAY-AAY-AAY-GGN-GGN-GGN, GGN-AAY-AAY-GGN-AAY-
GGN-GGN, GGN-AAY-AAY-GGN-GGN-AAY-GGN, GGN-AAY-AAY-GGN-GGN-
GGN-AAY, GGN-AAY-GGN-AAY-AAY-GGN-GGN, GGN-AAY-GGN-GGN-AAY-
AAY-GGN, GGN-AAY-GGN-GGN-GGN-AAY-AAY, GGN-AAY-GGN-AAY-GGN-
AAY-GGN, GGN-AAY-GGN-AAY-GGN-GGN-AAY, GGN-AAY-GGN-GGN-AAY-
GGN-AAY, GGN-GGN-AAY-AAY-AAY-GGN-GGN, GGN-GGN-AAY-AAY-GGN-
AAY-GGN, GGN-GGN-AAY-AAY-GGN-GGN-AAY, GGN-GGN-AAY-GGN-AAY-
AAY-GGN, GGN-GGN-AAY-GGN-AAY-GGN-AAY, GGN-GGN-AAY-GGN-GGN-
AAY-AAY, GGN-GGN-GGN-AAY-AAY-AAY-GGN, GGN-GGN-GGN-AAY-AAY-
GGN-AAY, GGN-GGN-GGN-AAY-GGN-AAY-AAY, GGN-GGN-GGN-GGN-GGN-
AAY-AAY, AAY-AAY-GGN-GGN-GGN-GGN-GGN, AAY-GGN-AAY-GGN-GGN-
GGN-GGN, AAY-GGN-GGN-AAY-GGN-GGN-GGN, AAY-GGN-GGN-GGN-AAY-
GGN-GGN, AAY-GGN-GGN-GGN-GGN-AAY-GGN, AAY-GGN-GGN-GGN-GGN-
GGN-AAY, GGN-AAY-AAY-GGN-GGN-GGN-GGN, GGN-AAY-GGN-AAY-GGN-
GGN-GGN, GGN-AAY-GGN-GGN-AAY-GGN-GGN, GGN-AAY-GGN-GGN-GGN-
AAY-GGN, GGN-AAY-GGN-GGN-GGN-GGN-AAY, GGN-GGN-AAY-AAY-GGN-
GGN-GGN, GGN-GGN-AAY-GGN-AAY-GGN-GGN, GGN-GGN-AAY-GGN-GGN-
AAY-GGN, GGN-GGN-AAY-GGN-GGN-GGN-AAY, GGN-GGN-GGN-AAY-AAY-
GGN-GGN, GGN-GGN-GGN-AAY-GGN-AAY-GGN, GGN-GGN-GGN-AAY-GGN-
GGN-AAY, GGN-GGN-GGN-GGN-AAY-AAY-GGN, GGN-GGN-GGN-GGN-AAY-
GGN-AAY-GGN-GGN-GGN-GGN-GGN-GGN-AAY, AAY-GGN-GGN-GGN-GGN-
GGN-GGN, GGN-AAY-GGN-GGN-GGN-GGN-GGN, GGN-GGN-AAY-GGN-GGN-
GGN-GGN, GGN-GGN-GGN-AAY-GGN-GGN-GGN, GGN-GGN-GGN-GGN-AAY-
GGN-GGN, GGN-GGN-GGN-GGN-GGN-AAY-GGN
Oligonucleotides of peptide motifs containing 3-7 amino
acide residues with G(glycine) as the major constituent and
D(Aspartic Acid) as the minor constituent
GGN-GGN-GAY, GAY-GGN-GGN, GGN-GAY-GGN, GGN-GGN-GGN-GAY, GAY-
GGN-GGN-GGN, GGN-GAY-GGN-GGN, GGN-GGN-GAY-GGN, GGN-GGN-GGN-
GGN-GAY, GAY-GGN-GGN-GGN-GGN, GGN-GAY-GGN-GGN-GGN, GGN-GGN-
GAY-GGN-GGN, GGN-GGN-GGN-GAY-GGN, GGN-GGN-GGN-GAY-GAY, GAY-
GAY-GGN-GGN-GGN, GAY-GGN-GAY-GGN-GGN, GAY-GGN-GGN-GAY-GGN,
GAY-GGN-GGN-GGN-GAY, GGN-GAY-GAY-GGN-GGN, GGN-GAY-GGN-GAY-
GGN, GGN-GAY-GGN-GGN-GAY, GGN-GGN-GAY-GAY-GGN, GGN-GGN-GAY-
GGN-GAY, GGN-GGN-GGN-GGN-GGN-GAY, GAY-GGN-GGN-GGN-GGN-GGN,
GGN-GAY-GGN-GGN-GGN-GGN, GGN-GGN-GAY-GGN-GGN-GGN, GGN-GGN-
GGN-GAY-GGN-GGN, GGN-GGN-GGN-GGN-GAY-GGN, GGN-GGN-GGN-GGN-
GAY-GAY, GAY-GAY-GGN-GGN-GGN-GGN, GAY-GGN-GAY-GGN-GGN-GGN,
GAY-GGN-GGN-GAY-GGN-GGN, GAY-GGN-GGN-GGN-GAY-GGN, GAY-GGN-
GGN-GGN-GGN-GAY, GGN-GAY-GAY-GGN-GGN-GGN, GGN-GAY-GGN-GAY-
GGN-GGN, GGN-GAY-GGN-GGN-GAY-GGN, GGN-GAY-GGN-GGN-GGN-GAY,
GGN-GGN-GAY-GAY-GGN-GGN, GGN-GGN-GAY-GGN-GAY-GGN, GGN-GGN-
GAY-GGN-GGN-GAY, GGN-GGN-GGN-GAY-GAY-GGN, GGN-GGN-GGN-GAY-
GGN-GAY, GGN-GGN-GGN-GGN-GAY-GAY-GAY, GAY-GAY-GAY-GGN-GGN-
GGN-GGN, GAY-GGN-GAY-GAY-GGN-GGN-GGN, GAY-GGN-GAY-GGN-GAY-
GGN-GGN, GAY-GGN-GAY-GGN-GGN-GAY-GGN, GAY-GGN-GAY-GGN-GGN-
GGN-GAY, GAY-GGN-GGN-GAY-GAY-GGN-GGN, GAY-GGN-GGN-GAY-GGN-
GAY-GGN, GAY-GGN-GGN-GAY-GGN-GGN-GAY, GAY-GGN-GGN-GGN-GAY-
GGN-GAY, GAY-GGN-GGN-GGN-GAY-GAY-GGN, GAY-GGN-GGN-GGN-GGN-
GAY-GAY, GAY-GAY-GGN-GAY-GGN-GGN-GGN, GAY-GAY-GGN-GGN-GAY-
GGN-GGN, GAY-GAY-GGN-GGN-GGN-GAY-GGN, GAY-GAY-GGN-GGN-GGN-
GGN-GAY, GGN-GAY-GAY-GAY-GGN-GGN-GGN, GGN-GAY-GAY-GGN-GAY-
GGN-GGN, GGN-GAY-GAY-GGN-GGN-GAY-GGN, GGN-GAY-GAY-GGN-GGN-
GGN-GAY, GGN-GAY-GGN-GAY-GAY-GGN-GGN, GGN-GAY-GGN-GGN-GAY-
GAY-GGN, GGN-GAY-GGN-GGN-GGN-GAY-GAY, GGN-GAY-GGN-GAY-GGN-
GAY-GGN, GGN-GAY-GGN-GAY-GGN-GGN-GAY, GGN-GAY-GGN-GGN-GAY-
GGN-GAY, GGN-GGN-GAY-GAY-GAY-GGN-GGN, GGN-GGN-GAY-GAY-GGN-
GAY-GGN, GGN-GGN-GAY-GAY-GGN-GGN-GAY, GGN-GGN-GAY-GGN-GAY-
GAY-GGN, GGN-GGN-GAY-GGN-GAY-GGN-GAY, GGN-GGN-GAY-GGN-GGN-
GAY-GAY, GGN-GGN-GGN-GAY-GAY-GAY-GGN, GGN-GGN-GGN-GAY-GAY-
GGN-GAY, GGN-GGN-GGN-GAY-GGN-GAY-GAY, GGN-GGN-GGN-GGN-GGN-
GAY-GAY, GAY-GAY-GGN-GGN-GGN-GGN-GGN, GAY-GGN-GAY-GGN-GGN-
GGN-GGN, GAY-GGN-GGN-GAY-GGN-GGN-GGN, GAY-GGN-GGN-GGN-GAY-
GGN-GGN, GAY-GGN-GGN-GGN-GGN-GAY-GGN, GAY-GGN-GGN-GGN-GGN-
GGN-GAY, GGN-GAY-GAY-GGN-GGN-GGN-GGN, GGN-GAY-GGN-GAY-GGN-
GGN-GGN, GGN-GAY-GGN-GGN-GAY-GGN-GGN, GGN-GAY-GGN-GGN-GGN-
GAY-GGN, GGN-GAY-GGN-GGN-GGN-GGN-GAY, GGN-GGN-GAY-GAY-GGN-
GGN-GGN, GGN-GGN-GAY-GGN-GAY-GGN-GGN, GGN-GGN-GAY-GGN-GGN-
GAY-GGN, GGN-GGN-GAY-GGN-GGN-GGN-GAY, GGN-GGN-GGN-GAY-GAY-
GGN-GGN, GGN-GGN-GGN-GAY-GGN-GAY-GGN, GGN-GGN-GGN-GAY-GGN-
GGN-GAY, GGN-GGN-GGN-GGN-GAY-GAY-GGN, GGN-GGN-GGN-GGN-GAY-
GGN-GAY-GGN-GGN-GGN-GGN-GGN-GGN-GAY, GAY-GGN-GGN-GGN-GGN-
GGN-GGN, GGN-GAY-GGN-GGN-GGN-GGN-GGN, GGN-GGN-GAY-GGN-GGN-
GGN-GGN, GGN-GGN-GGN-GAY-GGN-GGN-GGN, GGN-GGN-GGN-GGN-GAY-
GGN-GGN, GGN-GGN-GGN-GGN-GGN-GAY-GGN
Q(glutamine) as major constituent
Oligonucleotides of peptide motifs containing 3-7 amino
acide residues with Q(Glutamine) as the major constituent
and T(Threonine) as the minor constituent
CAR-CAR-ACN, ACN-CAR-CAR, CAR-ACN-CAR, CAR-CAR-CAR-ACN, ACN-
CAR-CAR-CAR, CAR-ACN-CAR-CAR, CAR-CAR-ACN-CAR, CAR-CAR-CAR-
CAR-ACN, ACN-CAR-CAR-CAR-CAR, CAR-ACN-CAR-CAR-CAR, CAR-CAR-
ACN-CAR-CAR, CAR-CAR-CAR-ACN-CAR, CAR-CAR-CAR-ACN-ACN, ACN-
ACN-CAR-CAR-CAR, ACN-CAR-ACN-CAR-CAR, ACN-CAR-CAR-ACN-CAR,
ACN-CAR-CAR-CAR-ACN, CAR-ACN-ACN-CAR-CAR, CAR-ACN-CAR-ACN-
CAR, CAR-ACN-CAR-CAR-ACN, CAR-CAR-ACN-ACN-CAR, CAR-CAR-ACN-
CAR-ACN, CAR-CAR-CAR-CAR-CAR-ACN, ACN-CAR-CAR-CAR-CAR-CAR,
CAR-ACN-CAR-CAR-CAR-CAR, CAR-CAR-ACN-CAR-CAR-CAR, CAR-CAR-
CAR-ACN-CAR-CAR, CAR-CAR-CAR-CAR-ACN-CAR, CAR-CAR-CAR-CAR-
ACN-ACN, ACN-ACN-CAR-CAR-CAR-CAR, ACN-CAR-ACN-CAR-CAR-CAR,
ACN-CAR-CAR-ACN-CAR-CAR, ACN-CAR-CAR-CAR-ACN-CAR, ACN-CAR-
CAR-CAR-CAR-ACN, CAR-ACN-ACN-CAR-CAR-CAR, CAR-ACN-CAR-ACN-
CAR-CAR, CAR-ACN-CAR-CAR-ACN-CAR, CAR-ACN-CAR-CAR-CAR-ACN,
CAR-CAR-ACN-ACN-CAR-CAR, CAR-CAR-ACN-CAR-ACN-CAR, CAR-CAR-
ACN-CAR-CAR-ACN, CAR-CAR-CAR-ACN-ACN-CAR, CAR-CAR-CAR-ACN-
CAR-ACN, CAR-CAR-CAR-CAR-ACN-ACN-ACN, ACN-ACN-ACN-CAR-CAR-
CAR-CAR, ACN-CAR-ACN-ACN-CAR-CAR-CAR, ACN-CAR-ACN-CAR-ACN-
CAR-CAR, ACN-CAR-ACN-CAR-CAR-ACN-CAR, ACN-CAR-ACN-CAR-CAR-
CAR-ACN, ACN-CAR-CAR-ACN-ACN-CAR-CAR, ACN-CAR-CAR-ACN-CAR-
ACN-CAR, ACN-CAR-CAR-ACN-CAR-CAR-ACN, ACN-CAR-CAR-CAR-ACN-
CAR-ACN, ACN-CAR-CAR-CAR-ACN-ACN-CAR, ACN-CAR-CAR-CAR-CAR-
ACN-ACN, ACN-ACN-CAR-ACN-CAR-CAR-CAR, ACN-ACN-CAR-CAR-ACN-
CAR-CAR, ACN-ACN-CAR-CAR-CAR-ACN-CAR, ACN-ACN-CAR-CAR-CAR-
CAR-ACN, CAR-ACN-ACN-ACN-CAR-CAR-CAR, CAR-ACN-ACN-CAR-ACN-
CAR-CAR, CAR-ACN-ACN-CAR-CAR-ACN-CAR, CAR-ACN-ACN-CAR-CAR-
CAR-ACN, CAR-ACN-CAR-ACN-ACN-CAR-CAR, CAR-ACN-CAR-CAR-ACN-
ACN-CAR, CAR-ACN-CAR-CAR-CAR-ACN-ACN, CAR-ACN-CAR-ACN-CAR-
ACN-CAR, CAR-ACN-CAR-ACN-CAR-CAR-ACN, CAR-ACN-CAR-CAR-ACN-
CAR-ACN, CAR-CAR-ACN-ACN-ACN-CAR-CAR, CAR-CAR-ACN-ACN-CAR-
ACN-CAR, CAR-CAR-ACN-ACN-CAR-CAR-ACN, CAR-CAR-ACN-CAR-ACN-
ACN-CAR, CAR-CAR-ACN-CAR-ACN-CAR-ACN, CAR-CAR-ACN-CAR-CAR-
ACN-ACN, CAR-CAR-CAR-ACN-ACN-ACN-CAR, CAR-CAR-CAR-ACN-ACN-
CAR-ACN, CAR-CAR-CAR-ACN-CAR-ACN-ACN, CAR-CAR-CAR-CAR-CAR-
ACN-ACN, ACN-ACN-CAR-CAR-CAR-CAR-CAR, ACN-CAR-ACN-CAR-CAR-
CAR-CAR, ACN-CAR-CAR-ACN-CAR-CAR-CAR, ACN-CAR-CAR-CAR-ACN-
CAR-CAR, ACN-CAR-CAR-CAR-CAR-ACN-CAR, ACN-CAR-CAR-CAR-CAR-
CAR-ACN, CAR-ACN-ACN-CAR-CAR-CAR-CAR, CAR-ACN-CAR-ACN-CAR-
CAR-CAR, CAR-ACN-CAR-CAR-ACN-CAR-CAR, CAR-ACN-CAR-CAR-CAR-
ACN-CAR, CAR-ACN-CAR-CAR-CAR-CAR-ACN, CAR-CAR-ACN-ACN-CAR-
CAR-CAR, CAR-CAR-ACN-CAR-ACN-CAR-CAR, CAR-CAR-ACN-CAR-CAR-
ACN-CAR, CAR-CAR-ACN-CAR-CAR-CAR-ACN, CAR-CAR-CAR-ACN-ACN-
CAR-CAR, CAR-CAR-CAR-ACN-CAR-ACN-CAR, CAR-CAR-CAR-ACN-CAR-
CAR-ACN, CAR-CAR-CAR-CAR-ACN-ACN-CAR, CAR-CAR-CAR-CAR-ACN-
CAR-ACN-CAR-CAR-CAR-CAR-CAR-CAR-ACN, ACN-CAR-CAR-CAR-CAR-
CAR-CAR, CAR-ACN-CAR-CAR-CAR-CAR-CAR, CAR-CAR-ACN-CAR-CAR-
CAR-CAR, CAR-CAR-CAR-ACN-CAR-CAR-CAR, CAR-CAR-CAR-CAR-ACN-
CAR-CAR, CAR-CAR-CAR-CAR-CAR-ACN-CAR
Oligonucleotides of peptide motifs containing 3-7 amino
acide residues with Q(Glutamine) as the major constituent
and A(Alanine) as the minor constituent
CAR-CAR-GCN, GCN-CAR-CAR, CAR-GCN-CAR, CAR-CAR-CAR-GCN, GCN-
CAR-CAR-CAR, CAR-GCN-CAR-CAR, CAR-CAR-GCN-CAR, CAR-CAR-CAR-
CAR-GCN, GCN-CAR-CAR-CAR-CAR, CAR-GCN-CAR-CAR-CAR, CAR-CAR-
GCN-CAR-CAR, CAR-CAR-CAR-GCN-CAR, CAR-CAR-CAR-GCN-GCN, GCN-
GCN-CAR-CAR-CAR, GCN-CAR-GCN-CAR-CAR, GCN-CAR-CAR-GCN-CAR,
GCN-CAR-CAR-CAR-GCN, CAR-GCN-GCN-CAR-CAR, CAR-GCN-CAR-GCN-
CAR, CAR-GCN-CAR-CAR-GCN, CAR-CAR-GCN-GCN-CAR, CAR-CAR-GCN-
CAR-GCN, CAR-CAR-CAR-CAR-CAR-GCN, GCN-CAR-CAR-CAR-CAR-CAR,
CAR-GCN-CAR-CAR-CAR-CAR, CAR-CAR-GCN-CAR-CAR-CAR, CAR-CAR-
CAR-GCN-CAR-CAR, CAR-CAR-CAR-CAR-GCN-CAR, CAR-CAR-CAR-CAR-
GCN-GCN, GCN-GCN-CAR-CAR-CAR-CAR, GCN-CAR-GCN-CAR-CAR-CAR,
GCN-CAR-CAR-GCN-CAR-CAR, GCN-CAR-CAR-CAR-GCN-CAR, GCN-CAR-
CAR-CAR-CAR-GCN, CAR-GCN-GCN-CAR-CAR-CAR, CAR-GCN-CAR-GCN-
CAR-CAR, CAR-GCN-CAR-CAR-GCN-CAR, CAR-GCN-CAR-CAR-CAR-GCN,
CAR-CAR-GCN-GCN-CAR-CAR, CAR-CAR-GCN-CAR-GCN-CAR, CAR-CAR-
GCN-CAR-CAR-GCN, CAR-CAR-CAR-GCN-GCN-CAR, CAR-CAR-CAR-GCN-
CAR-GCN, CAR-CAR-CAR-CAR-GCN-GCN-GCN, GCN-GCN-GCN-CAR-CAR-
CAR-CAR, GCN-CAR-GCN-GCN-CAR-CAR-CAR, GCN-CAR-GCN-CAR-GCN-
CAR-CAR, GCN-CAR-GCN-CAR-CAR-GCN-CAR, GCN-CAR-GCN-CAR-CAR-
CAR-GCN, GCN-CAR-CAR-GCN-GCN-CAR-CAR, GCN-CAR-CAR-GCN-CAR-
GCN-CAR, GCN-CAR-CAR-GCN-CAR-CAR-GCN, GCN-CAR-CAR-CAR-GCN-
CAR-GCN, GCN-CAR-CAR-CAR-GCN-GCN-CAR, GCN-CAR-CAR-CAR-CAR-
GCN-GCN, GCN-GCN-CAR-GCN-CAR-CAR-CAR, GCN-GCN-CAR-CAR-GCN-
CAR-CAR, GCN-GCN-CAR-CAR-CAR-GCN-CAR, GCN-GCN-CAR-CAR-CAR-
CAR-GCN, CAR-GCN-GCN-GCN-CAR-CAR-CAR, CAR-GCN-GCN-CAR-GCN-
CAR-CAR, CAR-GCN-GCN-CAR-CAR-GCN-CAR, CAR-GCN-GCN-CAR-CAR-
CAR-GCN, CAR-GCN-CAR-GCN-GCN-CAR-CAR, CAR-GCN-CAR-CAR-GCN-
GCN-CAR, CAR-GCN-CAR-CAR-CAR-GCN-GCN, CAR-GCN-CAR-GCN-CAR-
GCN-CAR, CAR-GCN-CAR-GCN-CAR-CAR-GCN, CAR-GCN-CAR-CAR-GCN-
CAR-GCN, CAR-CAR-GCN-GCN-GCN-CAR-CAR, CAR-CAR-GCN-GCN-CAR-
GCN-CAR, CAR-CAR-GCN-GCN-CAR-CAR-GCN, CAR-CAR-GCN-CAR-GCN-
GCN-CAR, CAR-CAR-GCN-CAR-GCN-CAR-GCN, CAR-CAR-GCN-CAR-CAR-
GCN-GCN, CAR-CAR-CAR-GCN-GCN-GCN-CAR, CAR-CAR-CAR-GCN-GCN-
CAR-GCN, CAR-CAR-CAR-GCN-CAR-GCN-GCN, CAR-CAR-CAR-CAR-CAR-
GCN-GCN, GCN-GCN-CAR-CAR-CAR-CAR-CAR, GCN-CAR-GCN-CAR-CAR-
CAR-CAR, GCN-CAR-CAR-GCN-CAR-CAR-CAR, GCN-CAR-CAR-CAR-GCN-
CAR-CAR, GCN-CAR-CAR-CAR-CAR-GCN-CAR, GCN-CAR-CAR-CAR-CAR-
CAR-GCN, CAR-GCN-GCN-CAR-CAR-CAR-CAR, CAR-GCN-CAR-GCN-CAR-
CAR-CAR, CAR-GCN-CAR-CAR-GCN-CAR-CAR, CAR-GCN-CAR-CAR-CAR-
GCN-CAR, CAR-GCN-CAR-CAR-CAR-CAR-GCN, CAR-CAR-GCN-GCN-CAR-
CAR-CAR, CAR-CAR-GCN-CAR-GCN-CAR-CAR, CAR-CAR-GCN-CAR-CAR-
GCN-CAR, CAR-CAR-GCN-CAR-CAR-CAR-GCN, CAR-CAR-CAR-GCN-GCN-
CAR-CAR, CAR-CAR-CAR-GCN-CAR-GCN-CAR, CAR-CAR-CAR-GCN-CAR-
CAR-GCN, CAR-CAR-CAR-CAR-GCN-GCN-CAR, CAR-CAR-CAR-CAR-GCN-
CAR-GCN-CAR-CAR-CAR-CAR-CAR-CAR-GCN, GCN-CAR-CAR-CAR-CAR-
CAR-CAR, CAR-GCN-CAR-CAR-CAR-CAR-CAR, CAR-CAR-GCN-CAR-CAR-
CAR-CAR, CAR-CAR-CAR-GCN-CAR-CAR-CAR, CAR-CAR-CAR-CAR-GCN-
CAR-CAR, CAR-CAR-CAR-CAR-CAR-GCN-CAR
Oligonucleotides of peptide motifs containing 3-7 amino
acide residues with Q(Glutamine) as the major constituent
and S(Serine) as the minor constituent
CAR-CAR-AGY, AGY-CAR-CAR, CAR-AGY-CAR, CAR-CAR-CAR-AGY, AGY-
CAR-CAR-CAR, CAR-AGY-CAR-CAR, CAR-CAR-AGY-CAR, CAR-CAR-CAR-
CAR-AGY, AGY-CAR-CAR-CAR-CAR, CAR-AGY-CAR-CAR-CAR, CAR-CAR-
AGY-CAR-CAR, CAR-CAR-CAR-AGY-CAR, CAR-CAR-CAR-AGY-AGY, AGY-
AGY-CAR-CAR-CAR, AGY-CAR-AGY-CAR-CAR, AGY-CAR-CAR-AGY-CAR,
AGY-CAR-CAR-CAR-AGY, CAR-AGY-AGY-CAR-CAR, CAR-AGY-CAR-AGY-
CAR, CAR-AGY-CAR-CAR-AGY, CAR-CAR-AGY-AGY-CAR, CAR-CAR-AGY-
CAR-AGY, CAR-CAR-CAR-CAR-CAR-AGY, AGY-CAR-CAR-CAR-CAR-CAR,
CAR-AGY-CAR-CAR-CAR-CAR, CAR-CAR-AGY-CAR-CAR-CAR, CAR-CAR-
CAR-AGY-CAR-CAR, CAR-CAR-CAR-CAR-AGY-CAR, CAR-CAR-CAR-CAR-
AGY-AGY, AGY-AGY-CAR-CAR-CAR-CAR, AGY-CAR-AGY-CAR-CAR-CAR,
AGY-CAR-CAR-AGY-CAR-CAR, AGY-CAR-CAR-CAR-AGY-CAR, AGY-CAR-
CAR-CAR-CAR-AGY, CAR-AGY-AGY-CAR-CAR-CAR, CAR-AGY-CAR-AGY-
CAR-CAR, CAR-AGY-CAR-CAR-AGY-CAR, CAR-AGY-CAR-CAR-CAR-AGY,
CAR-CAR-AGY-AGY-CAR-CAR, CAR-CAR-AGY-CAR-AGY-CAR, CAR-CAR-
AGY-CAR-CAR-AGY, CAR-CAR-CAR-AGY-AGY-CAR, CAR-CAR-CAR-AGY-
CAR-AGY, CAR-CAR-CAR-CAR-AGY-AGY-AGY, AGY-AGY-AGY-CAR-CAR-
CAR-CAR, AGY-CAR-AGY-AGY-CAR-CAR-CAR, AGY-CAR-AGY-CAR-AGY-
CAR-CAR, AGY-CAR-AGY-CAR-CAR-AGY-CAR, AGY-CAR-AGY-CAR-CAR-
CAR-AGY, AGY-CAR-CAR-AGY-AGY-CAR-CAR, AGY-CAR-CAR-AGY-CAR-
AGY-CAR, AGY-CAR-CAR-AGY-CAR-CAR-AGY, AGY-CAR-CAR-CAR-AGY-
CAR-AGY, AGY-CAR-CAR-CAR-AGY-AGY-CAR, AGY-CAR-CAR-CAR-CAR-
AGY-AGY, AGY-AGY-CAR-AGY-CAR-CAR-CAR, AGY-AGY-CAR-CAR-AGY-
CAR-CAR, AGY-AGY-CAR-CAR-CAR-AGY-CAR, AGY-AGY-CAR-CAR-CAR-
CAR-AGY, CAR-AGY-AGY-AGY-CAR-CAR-CAR, CAR-AGY-AGY-CAR-AGY-
CAR-CAR, CAR-AGY-AGY-CAR-CAR-AGY-CAR, CAR-AGY-AGY-CAR-CAR-
CAR-AGY, CAR-AGY-CAR-AGY-AGY-CAR-CAR, CAR-AGY-CAR-CAR-AGY-
AGY-CAR, CAR-AGY-CAR-CAR-CAR-AGY-AGY, CAR-AGY-CAR-AGY-CAR-
AGY-CAR, CAR-AGY-CAR-AGY-CAR-CAR-AGY, CAR-AGY-CAR-CAR-AGY-
CAR-AGY, CAR-CAR-AGY-AGY-AGY-CAR-CAR, CAR-CAR-AGY-AGY-CAR-
AGY-CAR, CAR-CAR-AGY-AGY-CAR-CAR-AGY, CAR-CAR-AGY-CAR-AGY-
AGY-CAR, CAR-CAR-AGY-CAR-AGY-CAR-AGY, CAR-CAR-AGY-CAR-CAR-
AGY-AGY, CAR-CAR-CAR-AGY-AGY-AGY-CAR, CAR-CAR-CAR-AGY-AGY-
CAR-AGY, CAR-CAR-CAR-AGY-CAR-AGY-AGY, CAR-CAR-CAR-CAR-CAR-
AGY-AGY, AGY-AGY-CAR-CAR-CAR-CAR-CAR, AGY-CAR-AGY-CAR-CAR-
CAR-CAR, AGY-CAR-CAR-AGY-CAR-CAR-CAR, AGY-CAR-CAR-CAR-AGY-
CAR-CAR, AGY-CAR-CAR-CAR-CAR-AGY-CAR, AGY-CAR-CAR-CAR-CAR-
CAR-AGY, CAR-AGY-AGY-CAR-CAR-CAR-CAR, CAR-AGY-CAR-AGY-CAR-
CAR-CAR, CAR-AGY-CAR-CAR-AGY-CAR-CAR, CAR-AGY-CAR-CAR-CAR-
AGY-CAR, CAR-AGY-CAR-CAR-CAR-CAR-AGY, CAR-CAR-AGY-AGY-CAR-
CAR-CAR, CAR-CAR-AGY-CAR-AGY-CAR-CAR, CAR-CAR-AGY-CAR-CAR-
AGY-CAR, CAR-CAR-AGY-CAR-CAR-CAR-AGY, CAR-CAR-CAR-AGY-AGY-
CAR-CAR, CAR-CAR-CAR-AGY-CAR-AGY-CAR, CAR-CAR-CAR-AGY-CAR-
CAR-AGY, CAR-CAR-CAR-CAR-AGY-AGY-CAR, CAR-CAR-CAR-CAR-AGY-
CAR-AGY-CAR-CAR-CAR-CAR-CAR-CAR-AGY, AGY-CAR-CAR-CAR-CAR-
CAR-CAR, CAR-AGY-CAR-CAR-CAR-CAR-CAR, CAR-CAR-AGY-CAR-CAR-
CAR-CAR, CAR-CAR-CAR-AGY-CAR-CAR-CAR, CAR-CAR-CAR-CAR-AGY-
CAR-CAR, CAR-CAR-CAR-CAR-CAR-AGY-CAR
Oligonucleotides of peptide motifs containing 3-7 amino
acide residues with Q(Glutamine) as the major constituent
and E(Glutamic Acid) as the minor constituent
CAR-CAR-GAR, GAR-CAR-CAR, CAR-GAR-CAR, CAR-CAR-CAR-GAR, GAR-
CAR-CAR-CAR, CAR-GAR-CAR-CAR, CAR-CAR-GAR-CAR, CAR-CAR-CAR-
CAR-GAR, GAR-CAR-CAR-CAR-CAR, CAR-GAR-CAR-CAR-CAR, CAR-CAR-
GAR-CAR-CAR, CAR-CAR-CAR-GAR-CAR, CAR-CAR-CAR-GAR-GAR, GAR-
GAR-CAR-CAR-CAR, GAR-CAR-GAR-CAR-CAR, GAR-CAR-CAR-GAR-CAR,
GAR-CAR-CAR-CAR-GAR, CAR-GAR-GAR-CAR-CAR, CAR-GAR-CAR-GAR-
CAR, CAR-GAR-CAR-CAR-GAR, CAR-CAR-GAR-GAR-CAR, CAR-CAR-GAR-
CAR-GAR, CAR-CAR-CAR-CAR-CAR-GAR, GAR-CAR-CAR-CAR-CAR-CAR,
CAR-GAR-CAR-CAR-CAR-CAR, CAR-CAR-GAR-CAR-CAR-CAR, CAR-CAR-
CAR-GAR-CAR-CAR, CAR-CAR-CAR-CAR-GAR-CAR, CAR-CAR-CAR-CAR-
GAR-GAR, GAR-GAR-CAR-CAR-CAR-CAR, GAR-CAR-GAR-CAR-CAR-CAR,
GAR-CAR-CAR-GAR-CAR-CAR, GAR-CAR-CAR-CAR-GAR-CAR, GAR-CAR-
CAR-CAR-CAR-GAR, CAR-GAR-GAR-CAR-CAR-CAR, CAR-GAR-CAR-GAR-
CAR-CAR, CAR-GAR-CAR-CAR-GAR-CAR, CAR-GAR-CAR-CAR-CAR-GAR,
CAR-CAR-GAR-GAR-CAR-CAR, CAR-CAR-GAR-CAR-GAR-CAR, CAR-CAR-
GAR-CAR-CAR-GAR, CAR-CAR-CAR-GAR-GAR-CAR, CAR-CAR-CAR-GAR-
CAR-GAR, CAR-CAR-CAR-CAR-GAR-GAR-GAR, GAR-GAR-GAR-CAR-CAR-
CAR-CAR, GAR-CAR-GAR-GAR-CAR-CAR-CAR, GAR-CAR-GAR-CAR-GAR-
CAR-CAR, GAR-CAR-GAR-CAR-CAR-GAR-CAR, GAR-CAR-GAR-CAR-CAR-
CAR-GAR, GAR-CAR-CAR-GAR-GAR-CAR-CAR, GAR-CAR-CAR-GAR-CAR-
GAR-CAR, GAR-CAR-CAR-GAR-CAR-CAR-GAR, GAR-CAR-CAR-CAR-GAR-
CAR-GAR, GAR-CAR-CAR-CAR-GAR-GAR-CAR, GAR-CAR-CAR-CAR-CAR-
GAR-GAR, GAR-GAR-CAR-GAR-CAR-CAR-CAR, GAR-GAR-CAR-CAR-GAR-
CAR-CAR, GAR-GAR-CAR-CAR-CAR-GAR-CAR, GAR-GAR-CAR-CAR-CAR-
CAR-GAR, CAR-GAR-GAR-GAR-CAR-CAR-CAR, CAR-GAR-GAR-CAR-GAR-
CAR-CAR, CAR-GAR-GAR-CAR-CAR-GAR-CAR, CAR-GAR-GAR-CAR-CAR-
CAR-GAR, CAR-GAR-CAR-GAR-GAR-CAR-CAR, CAR-GAR-CAR-CAR-GAR-
GAR-CAR, CAR-GAR-CAR-CAR-CAR-GAR-GAR, CAR-GAR-CAR-GAR-CAR-
GAR-CAR, CAR-GAR-CAR-GAR-CAR-CAR-GAR, CAR-GAR-CAR-CAR-GAR-
CAR-GAR, CAR-CAR-GAR-GAR-GAR-CAR-CAR, CAR-CAR-GAR-GAR-CAR-
GAR-CAR, CAR-CAR-GAR-GAR-CAR-CAR-GAR, CAR-CAR-GAR-CAR-GAR-
GAR-CAR, CAR-CAR-GAR-CAR-GAR-CAR-GAR, CAR-CAR-GAR-CAR-CAR-
GAR-GAR, CAR-CAR-CAR-GAR-GAR-GAR-CAR, CAR-CAR-CAR-GAR-GAR-
CAR-GAR, CAR-CAR-CAR-GAR-CAR-GAR-GAR, CAR-CAR-CAR-CAR-CAR-
GAR-GAR, GAR-GAR-CAR-CAR-CAR-CAR-CAR, GAR-CAR-GAR-CAR-CAR-
CAR-CAR, GAR-CAR-CAR-GAR-CAR-CAR-CAR, GAR-CAR-CAR-CAR-GAR-
CAR-CAR, GAR-CAR-CAR-CAR-CAR-GAR-CAR, GAR-CAR-CAR-CAR-CAR-
CAR-GAR, CAR-GAR-GAR-CAR-CAR-CAR-CAR, CAR-GAR-CAR-GAR-CAR-
CAR-CAR, CAR-GAR-CAR-CAR-GAR-CAR-CAR, CAR-GAR-CAR-CAR-CAR-
GAR-CAR, CAR-GAR-CAR-CAR-CAR-CAR-GAR, CAR-CAR-GAR-GAR-CAR-
CAR-CAR, CAR-CAR-GAR-CAR-GAR-CAR-CAR, CAR-CAR-GAR-CAR-CAR-
GAR-CAR, CAR-CAR-GAR-CAR-CAR-CAR-GAR, CAR-CAR-CAR-GAR-GAR-
CAR-CAR, CAR-CAR-CAR-GAR-CAR-GAR-CAR, CAR-CAR-CAR-GAR-CAR-
CAR-GAR, CAR-CAR-CAR-CAR-GAR-GAR-CAR, CAR-CAR-CAR-CAR-GAR-
CAR-GAR-CAR-CAR-CAR-CAR-CAR-CAR-GAR, GAR-CAR-CAR-CAR-CAR-
CAR-CAR, CAR-GAR-CAR-CAR-CAR-CAR-CAR, CAR-CAR-GAR-CAR-CAR-
CAR-CAR, CAR-CAR-CAR-GAR-CAR-CAR-CAR, CAR-CAR-CAR-CAR-GAR-
CAR-CAR, CAR-CAR-CAR-CAR-CAR-GAR-CAR
Oligonucleotides of peptide motifs containing 3-7 amino
acide residues with Q(Glutamine) as the major constituent
and H(Histidine) as the minor constituent
CAR-CAR-CAY, CAY-CAR-CAR, CAR-CAY-CAR, CAR-CAR-CAR-CAY, CAY-
CAR-CAR-CAR, CAR-CAY-CAR-CAR, CAR-CAR-CAY-CAR, CAR-CAR-CAR-
CAR-CAY, CAY-CAR-CAR-CAR-CAR, CAR-CAY-CAR-CAR-CAR, CAR-CAR-
CAY-CAR-CAR, CAR-CAR-CAR-CAY-CAR, CAR-CAR-CAR-CAY-CAY, CAY-
CAY-CAR-CAR-CAR, CAY-CAR-CAY-CAR-CAR, CAY-CAR-CAR-CAY-CAR,
CAY-CAR-CAR-CAR-CAY, CAR-CAY-CAY-CAR-CAR, CAR-CAY-CAR-CAY-
CAR, CAR-CAY-CAR-CAR-CAY, CAR-CAR-CAY-CAY-CAR, CAR-CAR-CAY-
CAR-CAY, CAR-CAR-CAR-CAR-CAR-CAY, CAY-CAR-CAR-CAR-CAR-CAR,
CAR-CAY-CAR-CAR-CAR-CAR, CAR-CAR-CAY-CAR-CAR-CAR, CAR-CAR-
CAR-CAY-CAR-CAR, CAR-CAR-CAR-CAR-CAY-CAR, CAR-CAR-CAR-CAR-
CAY-CAY, CAY-CAY-CAR-CAR-CAR-CAR, CAY-CAR-CAY-CAR-CAR-CAR,
CAY-CAR-CAR-CAY-CAR-CAR, CAY-CAR-CAR-CAR-CAY-CAR, CAY-CAR-
CAR-CAR-CAR-CAY, CAR-CAY-CAY-CAR-CAR-CAR, CAR-CAY-CAR-CAY-
CAR-CAR, CAR-CAY-CAR-CAR-CAY-CAR, CAR-CAY-CAR-CAR-CAR-CAY,
CAR-CAR-CAY-CAY-CAR-CAR, CAR-CAR-CAY-CAR-CAY-CAR, CAR-CAR-
CAY-CAR-CAR-CAY, CAR-CAR-CAR-CAY-CAY-CAR, CAR-CAR-CAR-CAY-
CAR-CAY, CAR-CAR-CAR-CAR-CAY-CAY-CAY, CAY-CAY-CAY-CAR-CAR-
CAR-CAR, CAY-CAR-CAY-CAY-CAR-CAR-CAR, CAY-CAR-CAY-CAR-CAY-
CAR-CAR, CAY-CAR-CAY-CAR-CAR-CAY-CAR, CAY-CAR-CAY-CAR-CAR-
CAR-CAY, CAY-CAR-CAR-CAY-CAY-CAR-CAR, CAY-CAR-CAR-CAY-CAR-
CAY-CAR, CAY-CAR-CAR-CAY-CAR-CAR-CAY, CAY-CAR-CAR-CAR-CAY-
CAR-CAY, CAY-CAR-CAR-CAR-CAY-CAY-CAR, CAY-CAR-CAR-CAR-CAR-
CAY-CAY, CAY-CAY-CAR-CAY-CAR-CAR-CAR, CAY-CAY-CAR-CAR-CAY-
CAR-CAR, CAY-CAY-CAR-CAR-CAR-CAY-CAR, CAY-CAY-CAR-CAR-CAR-
CAR-CAY, CAR-CAY-CAY-CAY-CAR-CAR-CAR, CAR-CAY-CAY-CAR-CAY-
CAR-CAR, CAR-CAY-CAY-CAR-CAR-CAY-CAR, CAR-CAY-CAY-CAR-CAR-
CAR-CAY, CAR-CAY-CAR-CAY-CAY-CAR-CAR, CAR-CAY-CAR-CAR-CAY-
CAY-CAR, CAR-CAY-CAR-CAR-CAR-CAY-CAY, CAR-CAY-CAR-CAY-CAR-
CAY-CAR, CAR-CAY-CAR-CAY-CAR-CAR-CAY, CAR-CAY-CAR-CAR-CAY-
CAR-CAY, CAR-CAR-CAY-CAY-CAY-CAR-CAR, CAR-CAR-CAY-CAY-CAR-
CAY-CAR, CAR-CAR-CAY-CAY-CAR-CAR-CAY, CAR-CAR-CAY-CAR-CAY-
CAY-CAR, CAR-CAR-CAY-CAR-CAY-CAR-CAY, CAR-CAR-CAY-CAR-CAR-
CAY-CAY, CAR-CAR-CAR-CAY-CAY-CAY-CAR, CAR-CAR-CAR-CAY-CAY-
CAR-CAY, CAR-CAR-CAR-CAY-CAR-CAY-CAY, CAR-CAR-CAR-CAR-CAR-
CAY-CAY, CAY-CAY-CAR-CAR-CAR-CAR-CAR, CAY-CAR-CAY-CAR-CAR-
CAR-CAR, CAY-CAR-CAR-CAY-CAR-CAR-CAR, CAY-CAR-CAR-CAR-CAY-
CAR-CAR, CAY-CAR-CAR-CAR-CAR-CAY-CAR, CAY-CAR-CAR-CAR-CAR-
CAR-CAY, CAR-CAY-CAY-CAR-CAR-CAR-CAR, CAR-CAY-CAR-CAY-CAR-
CAR-CAR, CAR-CAY-CAR-CAR-CAY-CAR-CAR, CAR-CAY-CAR-CAR-CAR-
CAY-CAR, CAR-CAY-CAR-CAR-CAR-CAR-CAY, CAR-CAR-CAY-CAY-CAR-
CAR-CAR, CAR-CAR-CAY-CAR-CAY-CAR-CAR, CAR-CAR-CAY-CAR-CAR-
CAY-CAR, CAR-CAR-CAY-CAR-CAR-CAR-CAY, CAR-CAR-CAR-CAY-CAY-
CAR-CAR, CAR-CAR-CAR-CAY-CAR-CAY-CAR, CAR-CAR-CAR-CAY-CAR-
CAR-CAY, CAR-CAR-CAR-CAR-CAY-CAY-CAR, CAR-CAR-CAR-CAR-CAY-
CAR-CAY-CAR-CAR-CAR-CAR-CAR-CAR-CAY, CAY-CAR-CAR-CAR-CAR-
CAR-CAR, CAR-CAY-CAR-CAR-CAR-CAR-CAR, CAR-CAR-CAY-CAR-CAR-
CAR-CAR, CAR-CAR-CAR-CAY-CAR-CAR-CAR, CAR-CAR-CAR-CAR-CAY-
CAR-CAR, CAR-CAR-CAR-CAR-CAR-CAY-CAR
Oligonucleotides of peptide motifs containing 3-7 amino
acide residues with Q(Glutamine) as the major constituent
and N(Asparagine) as the minor constituent
CAR-CAR-AAY, AAY-CAR-CAR, CAR-AAY-CAR, CAR-CAR-CAR-AAY, AAY-
CAR-CAR-CAR, CAR-AAY-CAR-CAR, CAR-CAR-AAY-CAR, CAR-CAR-CAR-
CAR-AAY, AAY-CAR-CAR-CAR-CAR, CAR-AAY-CAR-CAR-CAR, CAR-CAR-
AAY-CAR-CAR, CAR-CAR-CAR-AAY-CAR, CAR-CAR-CAR-AAY-AAY, AAY-
AAY-CAR-CAR-CAR, AAY-CAR-AAY-CAR-CAR, AAY-CAR-CAR-AAY-CAR,
AAY-CAR-CAR-CAR-AAY, CAR-AAY-AAY-CAR-CAR, CAR-AAY-CAR-AAY-
CAR, CAR-AAY-CAR-CAR-AAY, CAR-CAR-AAY-AAY-CAR, CAR-CAR-AAY-
CAR-AAY, CAR-CAR-CAR-CAR-CAR-AAY, AAY-CAR-CAR-CAR-CAR-CAR,
CAR-AAY-CAR-CAR-CAR-CAR, CAR-CAR-AAY-CAR-CAR-CAR, CAR-CAR-
CAR-AAY-CAR-CAR, CAR-CAR-CAR-CAR-AAY-CAR, CAR-CAR-CAR-CAR-
AAY-AAY, AAY-AAY-CAR-CAR-CAR-CAR, AAY-CAR-AAY-CAR-CAR-CAR,
AAY-CAR-CAR-AAY-CAR-CAR, AAY-CAR-CAR-CAR-AAY-CAR, AAY-CAR-
CAR-CAR-CAR-AAY, CAR-AAY-AAY-CAR-CAR-CAR, CAR-AAY-CAR-AAY-
CAR-CAR, CAR-AAY-CAR-CAR-AAY-CAR, CAR-AAY-CAR-CAR-CAR-AAY,
CAR-CAR-AAY-AAY-CAR-CAR, CAR-CAR-AAY-CAR-AAY-CAR, CAR-CAR-
AAY-CAR-CAR-AAY, CAR-CAR-CAR-AAY-AAY-CAR, CAR-CAR-CAR-AAY-
CAR-AAY, CAR-CAR-CAR-CAR-AAY-AAY-AAY, AAY-AAY-AAY-CAR-CAR-
CAR-CAR, AAY-CAR-AAY-AAY-CAR-CAR-CAR, AAY-CAR-AAY-CAR-AAY-
CAR-CAR, AAY-CAR-AAY-CAR-CAR-AAY-CAR, AAY-CAR-AAY-CAR-CAR-
CAR-AAY, AAY-CAR-CAR-AAY-AAY-CAR-CAR, AAY-CAR-CAR-AAY-CAR-
AAY-CAR, AAY-CAR-CAR-AAY-CAR-CAR-AAY, AAY-CAR-CAR-CAR-AAY-
CAR-AAY, AAY-CAR-CAR-CAR-AAY-AAY-CAR, AAY-CAR-CAR-CAR-CAR-
AAY-AAY, AAY-AAY-CAR-AAY-CAR-CAR-CAR, AAY-AAY-CAR-CAR-AAY-
CAR-CAR, AAY-AAY-CAR-CAR-CAR-AAY-CAR, AAY-AAY-CAR-CAR-CAR-
CAR-AAY, CAR-AAY-AAY-AAY-CAR-CAR-CAR, CAR-AAY-AAY-CAR-AAY-
CAR-CAR, CAR-AAY-AAY-CAR-CAR-AAY-CAR, CAR-AAY-AAY-CAR-CAR-
CAR-AAY, CAR-AAY-CAR-AAY-AAY-CAR-CAR, CAR-AAY-CAR-CAR-AAY-
AAY-CAR, CAR-AAY-CAR-CAR-CAR-AAY-AAY, CAR-AAY-CAR-AAY-CAR-
AAY-CAR, CAR-AAY-CAR-AAY-CAR-CAR-AAY, CAR-AAY-CAR-CAR-AAY-
CAR-AAY, CAR-CAR-AAY-AAY-AAY-CAR-CAR, CAR-CAR-AAY-AAY-CAR-
AAY-CAR, CAR-CAR-AAY-AAY-CAR-CAR-AAY, CAR-CAR-AAY-CAR-AAY-
AAY-CAR, CAR-CAR-AAY-CAR-AAY-CAR-AAY, CAR-CAR-AAY-CAR-CAR-
AAY-AAY, CAR-CAR-CAR-AAY-AAY-AAY-CAR, CAR-CAR-CAR-AAY-AAY-
CAR-AAY, CAR-CAR-CAR-AAY-CAR-AAY-AAY, CAR-CAR-CAR-CAR-CAR-
AAY-AAY, AAY-AAY-CAR-CAR-CAR-CAR-CAR, AAY-CAR-AAY-CAR-CAR-
CAR-CAR, AAY-CAR-CAR-AAY-CAR-CAR-CAR, AAY-CAR-CAR-CAR-AAY-
CAR-CAR, AAY-CAR-CAR-CAR-CAR-AAY-CAR, AAY-CAR-CAR-CAR-CAR-
CAR-AAY, CAR-AAY-AAY-CAR-CAR-CAR-CAR, CAR-AAY-CAR-AAY-CAR-
CAR-CAR, CAR-AAY-CAR-CAR-AAY-CAR-CAR, CAR-AAY-CAR-CAR-CAR-
AAY-CAR, CAR-AAY-CAR-CAR-CAR-CAR-AAY, CAR-CAR-AAY-AAY-CAR-
CAR-CAR, CAR-CAR-AAY-CAR-AAY-CAR-CAR, CAR-CAR-AAY-CAR-CAR-
AAY-CAR, CAR-CAR-AAY-CAR-CAR-CAR-AAY, CAR-CAR-CAR-AAY-AAY-
CAR-CAR, CAR-CAR-CAR-AAY-CAR-AAY-CAR, CAR-CAR-CAR-AAY-CAR-
CAR-AAY, CAR-CAR-CAR-CAR-AAY-AAY-CAR, CAR-CAR-CAR-CAR-AAY-
CAR-AAY-CAR-CAR-CAR-CAR-CAR-CAR-AAY, AAY-CAR-CAR-CAR-CAR-
CAR-CAR, CAR-AAY-CAR-CAR-CAR-CAR-CAR, CAR-CAR-AAY-CAR-CAR-
CAR-CAR, CAR-CAR-CAR-AAY-CAR-CAR-CAR, CAR-CAR-CAR-CAR-AAY-
CAR-CAR, CAR-CAR-CAR-CAR-CAR-AAY-CAR
Oligonucleotides of peptide motifs containing 3-7 amino
acide residues with Q(Glutamine) as the major constituent
and D(Aspartic Acid) as the minor constituent
CAR-CAR-GAY, GAY-CAR-CAR, CAR-GAY-CAR, CAR-CAR-CAR-GAY, GAY-
CAR-CAR-CAR, CAR-GAY-CAR-CAR, CAR-CAR-GAY-CAR, CAR-CAR-CAR-
CAR-GAY, GAY-CAR-CAR-CAR-CAR, CAR-GAY-CAR-CAR-CAR, CAR-CAR-
GAY-CAR-CAR, CAR-CAR-CAR-GAY-CAR, CAR-CAR-CAR-GAY-GAY, GAY-
GAY-CAR-CAR-CAR, GAY-CAR-GAY-CAR-CAR, GAY-CAR-CAR-GAY-CAR,
GAY-CAR-CAR-CAR-GAY, CAR-GAY-GAY-CAR-CAR, CAR-GAY-CAR-GAY-
CAR, CAR-GAY-CAR-CAR-GAY, CAR-CAR-GAY-GAY-CAR, CAR-CAR-GAY-
CAR-GAY, CAR-CAR-CAR-CAR-CAR-GAY, GAY-CAR-CAR-CAR-CAR-CAR,
CAR-GAY-CAR-CAR-CAR-CAR, CAR-CAR-GAY-CAR-CAR-CAR, CAR-CAR-
CAR-GAY-CAR-CAR, CAR-CAR-CAR-CAR-GAY-CAR, CAR-CAR-CAR-CAR-
GAY-GAY, GAY-GAY-CAR-CAR-CAR-CAR, GAY-CAR-GAY-CAR-CAR-CAR,
GAY-CAR-CAR-GAY-CAR-CAR, GAY-CAR-CAR-CAR-GAY-CAR, GAY-CAR-
CAR-CAR-CAR-GAY, CAR-GAY-GAY-CAR-CAR-CAR, CAR-GAY-CAR-GAY-
CAR-CAR, CAR-GAY-CAR-CAR-GAY-CAR, CAR-GAY-CAR-CAR-CAR-GAY,
CAR-CAR-GAY-GAY-CAR-CAR, CAR-CAR-GAY-CAR-GAY-CAR, CAR-CAR-
GAY-CAR-CAR-GAY, CAR-CAR-CAR-GAY-GAY-CAR, CAR-CAR-CAR-GAY-
CAR-GAY, CAR-CAR-CAR-CAR-GAY-GAY-GAY, GAY-GAY-GAY-CAR-CAR-
CAR-CAR, GAY-CAR-GAY-GAY-CAR-CAR-CAR, GAY-CAR-GAY-CAR-GAY-
CAR-CAR, GAY-CAR-GAY-CAR-CAR-GAY-CAR, GAY-CAR-GAY-CAR-CAR-
CAR-GAY, GAY-CAR-CAR-GAY-GAY-CAR-CAR, GAY-CAR-CAR-GAY-CAR-
GAY-CAR, GAY-CAR-CAR-GAY-CAR-CAR-GAY, GAY-CAR-CAR-CAR-GAY-
CAR-GAY, GAY-CAR-CAR-CAR-GAY-GAY-CAR, GAY-CAR-CAR-CAR-CAR-
GAY-GAY, GAY-GAY-CAR-GAY-CAR-CAR-CAR, GAY-GAY-CAR-CAR-GAY-
CAR-CAR, GAY-GAY-CAR-CAR-CAR-GAY-CAR, GAY-GAY-CAR-CAR-CAR-
CAR-GAY, CAR-GAY-GAY-GAY-CAR-CAR-CAR, CAR-GAY-GAY-CAR-GAY-
CAR-CAR, CAR-GAY-GAY-CAR-CAR-GAY-CAR, CAR-GAY-GAY-CAR-CAR-
CAR-GAY, CAR-GAY-CAR-GAY-GAY-CAR-CAR, CAR-GAY-CAR-CAR-GAY-
GAY-CAR, CAR-GAY-CAR-CAR-CAR-GAY-GAY, CAR-GAY-CAR-GAY-CAR-
GAY-CAR, CAR-GAY-CAR-GAY-CAR-CAR-GAY, CAR-GAY-CAR-CAR-GAY-
CAR-GAY, CAR-CAR-GAY-GAY-GAY-CAR-CAR, CAR-CAR-GAY-GAY-CAR-
GAY-CAR, CAR-CAR-GAY-GAY-CAR-CAR-GAY, CAR-CAR-GAY-CAR-GAY-
GAY-CAR, CAR-CAR-GAY-CAR-GAY-CAR-GAY, CAR-CAR-GAY-CAR-CAR-
GAY-GAY, CAR-CAR-CAR-GAY-GAY-GAY-CAR, CAR-CAR-CAR-GAY-GAY-
CAR-GAY, CAR-CAR-CAR-GAY-CAR-GAY-GAY, CAR-CAR-CAR-CAR-CAR-
GAY-GAY, GAY-GAY-CAR-CAR-CAR-CAR-CAR, GAY-CAR-GAY-CAR-CAR-
CAR-CAR, GAY-CAR-CAR-GAY-CAR-CAR-CAR, GAY-CAR-CAR-CAR-GAY-
CAR-CAR, GAY-CAR-CAR-CAR-CAR-GAY-CAR, GAY-CAR-CAR-CAR-CAR-
CAR-GAY, CAR-GAY-GAY-CAR-CAR-CAR-CAR, CAR-GAY-CAR-GAY-CAR-
CAR-CAR, CAR-GAY-CAR-CAR-GAY-CAR-CAR, CAR-GAY-CAR-CAR-CAR-
GAY-CAR, CAR-GAY-CAR-CAR-CAR-CAR-GAY, CAR-CAR-GAY-GAY-CAR-
CAR-CAR, CAR-CAR-GAY-CAR-GAY-CAR-CAR, CAR-CAR-GAY-CAR-CAR-
GAY-CAR, CAR-CAR-GAY-CAR-CAR-CAR-GAY, CAR-CAR-CAR-GAY-GAY-
CAR-CAR, CAR-CAR-CAR-GAY-CAR-GAY-CAR, CAR-CAR-CAR-GAY-CAR-
CAR-GAY, CAR-CAR-CAR-CAR-GAY-GAY-CAR, CAR-CAR-CAR-CAR-GAY-
CAR-GAY-CAR-CAR-CAR-CAR-CAR-CAR-GAY, GAY-CAR-CAR-CAR-CAR-
CAR-CAR, CAR-GAY-CAR-CAR-CAR-CAR-CAR, CAR-CAR-GAY-CAR-CAR-
CAR-CAR, CAR-CAR-CAR-GAY-CAR-CAR-CAR, CAR-CAR-CAR-CAR-GAY-
CAR-CAR, CAR-CAR-CAR-CAR-CAR-GAY-CAR

TABLE 8

| Symbol | | Origin of designation |
|---|---|---|
| a | a | adenine |
| g | g | guanine |
| c | c | cytosine |
| t | t | thymine |
| u | u | uracil |
| r | g or a | purine |
| y | t/u or c | pyrimidine |
| m | a or c | amino |
| k | g or t/u | keto |
| s | g or c | strong interactions 3H-bonds |
| w | a or t/u | weak interactions 2H-bonds |
| b | g or c or t/u | not a |
| d | a or g or t/u | not c |
| h | a or c or t/u | not g |
| v | a or g or c | not t, not u |
| n | a or g or c or t/u, | any |
| | unknown, or other | |

TABLE 9
((NNT)₁₅₅ disclosed as SEQ ID NO: 2)

| | | | | | | | | | Dose |
|---|---|---|---|---|---|---|---|---|---|
| | Admin | AUC_{∞} | T | AUC/D | | | | | normalized |
| Code | Dose° | ng* | last | h*kg* | t_{1/2} | Cl | Vₛₛ | MRT_{∞} | AUC_{∞}^{§} |
| Construct | μg/kg | h/mL | h | ng/mL/μg | h | mL/h/kg | mL/kg | h | ng* h/mL |
| NNT₁₅₅ | 2.6 | 274.5 | 24 | 105.6 | 6.2 | 9.5 | 78.2 | 8.2 | 316.7 |
| C-GSF | 3.2 | 20.91 | 8 | 6.53 | 1.53 | 153.0 | 160.1 | 1.0 | 19.60 |
| Control (A) | | | | | | | | | |
| NEUPOGEN*³⁰ | 3.0 | 47.01 | 8 | 15.7 | 1.13 | 63.8 | 77.0 | 1.2 | 47.01 |
| NEULASTA | 6.0 | 116.4 | 24 | 19.4 | 3.04 | 51.5 | 266.1 | 5.2 | 58.20 |

1. A biologically active protein conjugate comprising a biologically active polypeptide coupled via a peptide bond to a polypeptide comprising from 2 to about 500 units of a peptide comprising as a major constituent, two or more residues of one amino acid selected from Gly (G), Asn (N) and Gln (Q), and as a minor constituent, one or more residues of one amino acid selected from Ala (A), Ser (S), Thr (T), Asp (D), Gln (Q), Glu (E), His (H) and Asn (N), provided that none of said amino acids is present in said major constituent and said minor constituent, such that said biologically active protein conjugate has a modified plasma half-life compared to the intrinsic half-life of the unconjugated biologically active polypeptide.

2. The protein conjugate of claim 1, wherein said peptide comprises 3-6 amino acid residues.

3. The protein conjugate of claim 1, wherein said peptide comprises 3 amino acid residues.

4. The protein conjugate of claim 1, wherein said peptide comprises 4 amino acid residues.

5. The protein conjugate of claim 1, wherein said peptide comprises 5 amino acid residues.

6. The protein conjugate of claim 5, wherein said minor constituent comprises 1 amino acid residue of said peptide.

7. The protein conjugate of claim 1, wherein said peptide comprises 6 amino acid residues.

8. The protein conjugate of claim 7, wherein said minor constituent comprises 1 amino acid residue of said peptide.

9. The protein conjugate of claim 1, wherein said peptide has a sequence consisting of N and T amino acid residues.

10. The protein conjugate of claim 1, wherein said peptide has a sequence consisting of N and E amino acid residues.

11. The protein conjugate of claim 1, wherein said peptide has a sequence consisting of Q and S amino acid residues.

12. The protein conjugate of claim 1, wherein said peptide has a sequence consisting of N and Q amino acid residues.

13. The protein conjugate of claim 1, wherein said polypeptide is N-terminal with respect to said biologically active polypeptide.

14. The protein conjugate of claim 1, wherein said polypeptide is C-terminal with respect to said biologically active polypeptide.

15. The protein conjugate of claim 1, wherein said polypeptide is situated at both the N and C-terminus with respect to said biologically active polypeptide.

16. The protein conjugate of claim 1, wherein said biologically active polypeptide is a cytokine.

17. The protein conjugate of claim 16, wherein said cytokine is granulocyte colony stimulating factor (G-CSF).

18. The protein conjugate of claim 16, wherein said cytokine is human growth hormone.

19. The protein conjugate of claim 16, wherein said cytokine is an interferon.

20. The protein conjugate of claim 19, wherein said interferon is a beta-interferon.

21. The protein conjugate of claim 19, wherein said interferon is a gamma-interferon.

22. The protein conjugate of claim 1, wherein said biologically active polypeptide comprises an antibody, antibody fragment, proteolytic antibody fragment or domain, single chain antibody, genetically or chemically optimized antibody or fragment thereof.

23. The protein conjugate of claim 1, wherein said biologically active polypeptide comprises a soluble gp120 or gp160 glycoprotein.

24. The protein conjugate of claim 1, wherein said biologically active polypeptide comprises a coagulation factor.

25. The protein conjugate of claim 1, wherein said biologically active polypeptide comprises a soluble receptor.

26. The protein conjugate of claim 25, wherein said soluble receptor comprises a tumor necrosis factor (TNF)-α type II receptor.

27. The protein conjugate of claim 1, wherein said biologically active polypeptide comprises erythropoietin.

28. The protein conjugate of claim 1, having a modified half-life that is decreased relative compared to the intrinsic half-life of the unconjugated biologically active polypeptide.

29. The protein conjugate of claim 28, wherein said biologically active polypeptide comprises a recombinant activated protein C.

30. The protein conjugate of claim 28, wherein said biologically active polypeptide comprises a recombinant Factor VII.

31. The protein conjugate of claim 1, wherein said biologically active polypeptide is a therapeutic enzyme.

32. A composition comprising the protein conjugate of claim 1 and a carrier.

33. The composition of claim 32, wherein said carrier is a pharmaceutically effective carrier.

34. A chimeric DNA molecule encoding the protein conjugate of claim 1.

35. A vector comprising the chimeric DNA molecule of claim 34.

36. The vector of claim 35, which is a plasmid.

37. The vector of claim 36, wherein said plasmid is pCE2.

38. A cell transformed with the vector of claim 35.

39. The cell of claim 38, which is a mammalian cell.

40. The cell of claim 39, wherein said mammalian cell is a Chinese hamster ovary (CHO) cell.

41. The cell of claim 38, which is a bacterium.

42. The cell of claim 41, wherein the bacterium is E. coli.

43. The cell of claim 38, which is yeast.

44. A method of making a biologically active protein conjugate comprising a biologically active polypeptide coupled via peptide bond to a polypeptide comprising from 2 to about 500 units of a peptide comprising as a major constituent, two or more residues of one amino acid selected from Gly (G), Asn (N) and Gln (Q), and as a minor constituent, one or more residues of one amino acid selected from Ala (A), Ser (S), Thr (T), Asp (D), Gln (Q), Glu (E), His (H) and Asn (N), provided that none of said amino acids is present in said major constituent and said minor constituent, such that said biologically active protein has a modified plasma half-life compared to intrinsic half-life of the unconjugated biologically active polypeptide, said method comprising:
culturing a cell transformed with a chimeric DNA molecule encoding said protein conjugate under conditions whereby said DNA is expressed, thereby producing said protein conjugate; and
extracting an expression product of said chimeric DNA molecule from said cell.

45. The method of claim 44, wherein said chimeric DNA molecule is introduced into said cell through insertion of said chimeric DNA molecule into a vector which is then transformed into said cell.

46. A method of determining whether a given protein conjugate exhibits a modified plasma half-life compared to the intrinsic half-life of the unconjugated biologically active polypeptide, comprising:
a) preparing a protein conjugate comprising a biologically active polypeptide coupled via a peptide bond to a polypeptide that comprises from 2 to about 500 repeating units of a peptide motif, wherein the motif comprises a major constituent and a minor constituent, in which the major constituent comprises or consists of two or more residues of one amino acid selected from the group consisting of Gly (G), Asn (N) and Gln IQ), and the minor constituent comprises or consists of one or more residues of one amino acid selected from the group consisting of Ala (A), Ser (S), Thr (T), Asp (D), Gln (O), Glu (E), His (H) and Asn (N), wherein none of the amino acids is present in both the major constituent and said minor constituent, and
b) testing the protein conjugate to determine whether the protein conjugate has a modified plasma half-life compared to the intrinsic half-life of the unconjugated biologically active polypeptide.

The application's sequence listing, which the Patent Office published only in electronic form, follows.

SEQUENCE LISTING (4747 sequences)

SEQ ID NO: 1 - protein, 195 aa, Artificial Sequence
  Description of Artificial Sequence: Synthetic peptide
NNTNNTNNTNNTNNTNNTNNTNNTNNTNNTNNTNNTNNTNNTNNTNNTNNTNNTNNTNNTNNTNNTNNTNNTNNTNNTNNTNNTNNTNNTNNTNNTNNTNNTNNTNNTNNTNNTNNTNNTNNTNNTNNTNNTNNTNNTNNTNNTNNTNNTNNTNNTNNTNNTNNTNNTNNTNNTNNTNNTNNTNNTNNTNNTNNT

SEQ ID NO: 2 - protein, 465 aa, Artificial Sequence
  Description of Artificial Sequence: Synthetic peptide
NNTNNTNNTNNTNNTNNTNNTNNTNNTNNTNNTNNTNNTNNTNNTNNTNNTNNTNNTNNTNNTNNTNNTNNTNNTNNTNNTNNTNNTNNTNNTNNTNNTNNTNNTNNTNNTNNTNNTNNTNNTNNTNNTNNTNNTNNTNNTNNTNNTNNTNNTNNTNNTNNTNNTNNTNNTNNTNNTNNTNNTNNTNNTNNTNNTNNTNNTNNTNNTNNTNNTNNTNNTNNTNNTNNTNNTNNTNNTNNTNNTNNTNNTNNTNNTNNTNNTNNTNNTNNTNNTNNTNNTNNTNNTNNTNNTNNTNNTNNTNNTNNTNNTNNTNNTNNTNNTNNTNNTNNTNNTNNTNNTNNTNNTNNTNNTNNTNNTNNTNNTNNTNNTNNTNNTNNTNNTNNTNNTNNTNNTNNTNNTNNTNNTNNTNNTNNTNNTNNTNNTNNTNNTNNTNNTNNTNNTNNTNNTNNTNNTNNTNNTNNTNNT

SEQ ID NO: 3 - protein, 488 aa, Artificial Sequence
  Description of Artificial Sequence: Synthetic peptide
NNNNNTNNNNNNNTNNNNNNNTNNNNNNNTNNNNNNNTNNNNNNNTNNNNNNNTNNNNNNNTNNNNNNNTNNNNNNNTNNNNNNNTNNNNNNNTNNNNNNNTNNNNNNNTNNNNNNNTNNNNNNNTNNNNNNNTNNNNNNNTNNNNNNNTNNNNNNNTNNNNNNNTNNNNNNNTNNNNNNNTNNNNNNNTNNNNNNNTNNNNNNNTNNNNNNNTNNNNNNNTNNNNNNNTNNNNNNNTNNNNNNNTNNNNNNNTNNNNNNNTNNNNNNNTNNNNNNNTNNNNNNNTNNNNNNNTNNNNNNNTNNNNNNNTNNNNNNNTNNNNNNNTNNNNNNNTNNNNNNNTNNNNNNNTNNNNNNNTNNNNNNNTNNNNNNNTNNNNNNNTNNNNNNNTNNNNNNNTNNNNNNNTNNNNNNNTNNNNNNNTNNNNNNNTNNNNNNNTNNNNNNNTNNNNNNNTNNNNNNNTNNNNNNNTNNNNNNNTNNNNNNNTNN

SEQ ID NO: 4 - protein, 225 aa, Artificial Sequence
  Description of Artificial Sequence: Synthetic peptide
NNTNNTNNTNNTNNTNNTNNTNNTNNTNNTNNTNNTNNTNNTNNTNNTNNTNNTNNTNNTNNTNNTNNTNNTNNTNNTNNTNNTNNTNNTNNTNNTNNTNNTNNTNNTNNTNNTNNTNNTNNTNNTNNTNNTNNTNNTNNTNNTNNTNNTNNTNNTNNTNNTNNTNNTNNTNNTNNTNNTNNTNNTNNTNNTNNTNNTNNTNNTNNTNNTNNTNNTNNTNNTNNT

SEQ ID NO: 5 - protein, 228 aa, Artificial Sequence
  Description of Artificial Sequence: Synthetic peptide
NNTNNTNNTNNTNNTNNTNNTNNTNNTNNTNNTNNTNNTNNTNNTNNTNNTNNTNNTNNTNNTNNTNNTNNTNNTNNTNNTNNTNNTNNTNNTNNTNNTNNTNNTNNTNNTNNTNNTNNTNNTNNTNNTNNTNNTNNTNNTNNTNNTNNTNNTNNTNNTNNTNNTNNTNNTNNTNNTNNTNNTNNTNNTNNTNNTNNTNNTNNTNNTNNTNNTNNTNNTNNTNNTNNT

SEQ ID NO: 6 - protein, 231 aa, Artificial Sequence
  Description of Artificial Sequence: Synthetic peptide
NNTNNTNNTNNTNNTNNTNNTNNTNNTNNTNNTNNTNNTNNTNNTNNTNNTNNTNNTNNTNNTNNTNNTNNTNNTNNTNNTNNTNNTNNTNNTNNTNNTNNTNNTNNTNNTNNTNNTNNTNNTNNTNNTNNTNNTNNTNNTNNTNNTNNTNNTNNTNNTNNTNNTNNTNNTNNTNNTNNTNNTNNTNNTNNTNNTNNTNNTNNTNNTNNTNNTNNTNNTNNTNNTNNTNNT

SEQ ID NO: 7 - protein, 234 aa, Artificial Sequence
  Description of Artificial Sequence: Synthetic peptide
NNTNNTNNTNNTNNTNNTNNTNNTNNTNNTNNTNNTNNTNNTNNTNNTNNTNNTNNTNNTNNTNNTNNTNNTNNTNNTNNTNNTNNTNNTNNTNNTNNTNNTNNTNNTNNTNNTNNTNNTNNTNNTNNTNNTNNTNNTNNTNNTNNTNNTNNTNNTNNTNNTNNTNNTNNTNNTNNTNNTNNTNNTNNTNNTNNTNNTNNTNNTNNTNNTNNTNNTNNTNNTNNTNNTNNTNNT

SEQ ID NO: 8 - protein, 237 aa, Artificial Sequence
  Description of Artificial Sequence: Synthetic peptide
NNTNNTNNTNNTNNTNNTNNTNNTNNTNNTNNTNNTNNTNNTNNTNNTNNTNNTNNTNNTNNTNNTNNTNNTNNTNNTNNTNNTNNTNNTNNTNNTNNTNNTNNTNNTNNTNNTNNTNNTNNTNNTNNTNNTNNTNNTNNTNNTNNTNNTNNTNNTNNTNNTNNTNNTNNTNNTNNTNNTNNTNNTNNTNNTNNTNNTNNTNNTNNTNNTNNTNNTNNTNNTNNTNNTNNTNNTNNT

SEQ ID NO: 9 - protein, 240 aa, Artificial Sequence
  Description of Artificial Sequence: Synthetic peptide
NNTNNTNNTNNTNNTNNTNNTNNTNNTNNTNNTNNTNNTNNTNNTNNTNNTNNTNNTNNTNNTNNTNNTNNTNNTNNTNNTNNTNNTNNTNNTNNTNNTNNTNNTNNTNNTNNTNNTNNTNNTNNTNNTNNTNNTNNTNNTNNTNNTNNTNNTNNTNNTNNTNNTNNTNNTNNTNNTNNTNNTNNTNNTNNTNNTNNTNNTNNTNNTNNTNNTNNTNNTNNTNNTNNTNNTNNTNNTNNT

SEQ ID NO: 10 - protein, 243 aa, Artificial Sequence
  Description of Artificial Sequence: Synthetic peptide
NNTNNTNNTNNTNNTNNTNNTNNTNNTNNTNNTNNTNNTNNTNNTNNTNNTNNTNNTNNTNNTNNTNNTNNTNNTNNTNNTNNTNNTNNTNNTNNTNNTNNTNNTNNTNNTNNTNNTNNTNNTNNTNNTNNTNNTNNTNNTNNTNNTNNTNNTNNTNNTNNTNNTNNTNNTNNTNNTNNTNNTNNTNNTNNTNNTNNTNNTNNTNNTNNTNNTNNTNNTNNTNNTNNTNNTNNTNNTNNTNNT

SEQ ID NO: 11 - protein, 246 aa, Artificial Sequence
  Description of Artificial Sequence: Synthetic peptide
NNTNNTNNTNNTNNTNNTNNTNNTNNTNNTNNTNNTNNTNNTNNTNNTNNTNNTNNTNNTNNTNNTNNTNNTNNTNNTNNTNNTNNTNNTNNTNNTNNTNNTNNTNNTNNTNNTNNTNNTNNTNNTNNTNNTNNTNNTNNTNNTNNTNNTNNTNNTNNTNNTNNTNNTNNTNNTNNTNNTNNTNNTNNTNNTNNTNNTNNTNNTNNTNNTNNTNNTNNTNNTNNTNNTNNTNNTNNTNNTNNTNNT

SEQ ID NO: 12 - protein, 249 aa, Artificial Sequence
  Description of Artificial Sequence: Synthetic peptide
NNTNNTNNTNNTNNTNNTNNTNNTNNTNNTNNTNNTNNTNNTNNTNNTNNTNNTNNTNNTNNTNNTNNTNNTNNTNNTNNTNNTNNTNNTNNTNNTNNTNNTNNTNNTNNTNNTNNTNNTNNTNNTNNTNNTNNTNNTNNTNNTNNTNNTNNTNNTNNTNNTNNTNNTNNTNNTNNTNNTNNTNNTNNTNNTNNTNNTNNTNNTNNTNNTNNTNNTNNTNNTNNTNNTNNTNNTNNTNNTNNTNNTNNT

SEQ ID NO: 13 - protein, 252 aa, Artificial Sequence
  Description of Artificial Sequence: Synthetic peptide
NNTNNTNNTNNTNNTNNTNNTNNTNNTNNTNNTNNTNNTNNTNNTNNTNNTNNTNNTNNTNNTNNTNNTNNTNNTNNTNNTNNTNNTNNTNNTNNTNNTNNTNNTNNTNNTNNTNNTNNTNNTNNTNNTNNTNNTNNTNNTNNTNNTNNTNNTNNTNNTNNTNNTNNTNNTNNTNNTNNTNNTNNTNNTNNTNNTNNTNNTNNTNNTNNTNNTNNTNNTNNTNNTNNTNNTNNTNNTNNTNNTNNTNNTNNT

SEQ ID NO: 14 - protein, 255 aa, Artificial Sequence
  Description of Artificial Sequence: Synthetic peptide
NNTNNTNNTNNTNNTNNTNNTNNTNNTNNTNNTNNTNNTNNTNNTNNTNNTNNTNNTNNTNNTNNTNNTNNTNNTNNTNNTNNTNNTNNTNNTNNTNNTNNTNNTNNTNNTNNTNNTNNTNNTNNTNNTNNTNNTNNTNNTNNTNNTNNTNNTNNTNNTNNTNNTNNTNNTNNTNNTNNTNNTNNTNNTNNTNNTNNTNNTNNTNNTNNTNNTNNTNNTNNTNNTNNTNNTNNTNNTNNTNNTNNTNNTNNTNNT

SEQ ID NO: 15 - protein, 258 aa, Artificial Sequence
  Description of Artificial Sequence: Synthetic peptide
NNTNNTNNTNNTNNTNNTNNTNNTNNTNNTNNTNNTNNTNNTNNTNNTNNTNNTNNTNNTNNTNNTNNTNNTNNTNNTNNTNNTNNTNNTNNTNNTNNTNNTNNTNNTNNTNNTNNTNNTNNTNNTNNTNNTNNTNNTNNTNNTNNTNNTNNTNNTNNTNNTNNTNNTNNTNNTNNTNNTNNTNNTNNTNNTNNTNNTNNTNNTNNTNNTNNTNNTNNTNNTNNTNNTNNTNNTNNTNNTNNTNNTNNTNNTNNTNNT

SEQ ID NO: 16 - protein, 261 aa, Artificial Sequence
  Description of Artificial Sequence: Synthetic peptide
NNTNNTNNTNNTNNTNNTNNTNNTNNTNNTNNTNNTNNTNNTNNTNNTNNTNNTNNTNNTNNTNNTNNTNNTNNTNNTNNTNNTNNTNNTNNTNNTNNTNNTNNTNNTNNTNNTNNTNNTNNTNNTNNTNNTNNTNNTNNTNNTNNTNNTNNTNNTNNTNNTNNTNNTNNTNNTNNTNNTNNTNNTNNTNNTNNTNNTNNTNNTNNTNNTNNTNNTNNTNNTNNTNNTNNTNNTNNTNNTNNTNNTNNTNNTNNTNNTNNT

SEQ ID NO: 17 - protein, 264 aa, Artificial Sequence
  Description of Artificial Sequence: Synthetic peptide
NNTNNTNNTNNTNNTNNTNNTNNTNNTNNTNNTNNTNNTNNTNNTNNTNNTNNTNNTNNTNNTNNTNNTNNTNNTNNTNNTNNTNNTNNTNNTNNTNNTNNTNNTNNTNNTNNTNNTNNTNNTNNTNNTNNTNNTNNTNNTNNTNNTNNTNNTNNTNNTNNTNNTNNTNNTNNTNNTNNTNNTNNTNNTNNTNNTNNTNNTNNTNNTNNTNNTNNTNNTNNTNNTNNTNNTNNTNNTNNTNNTNNTNNTNNTNNTNNTNNTNNT

SEQ ID NO: 18 - protein, 267 aa, Artificial Sequence
  Description of Artificial Sequence: Synthetic peptide
NNTNNTNNTNNTNNTNNTNNTNNTNNTNNTNNTNNTNNTNNTNNTNNTNNTNNTNNTNNTNNTNNTNNTNNTNNTNNTNNTNNTNNTNNTNNTNNTNNTNNTNNTNNTNNTNNTNNTNNTNNTNNTNNTNNTNNTNNTNNTNNTNNTNNTNNTNNTNNTNNTNNTNNTNNTNNTNNTNNTNNTNNTNNTNNTNNTNNTNNTNNTNNTNNTNNTNNTNNTNNTNNTNNTNNTNNTNNTNNTNNTNNTNNTNNTNNTNNTNNTNNTNNT

SEQ ID NO: 19 - protein, 270 aa, Artificial Sequence
  Description of Artificial Sequence: Synthetic peptide
NNTNNTNNTNNTNNTNNTNNTNNTNNTNNTNNTNNTNNTNNTNNTNNTNNTNNTNNTNNTNNTNNTNNTNNTNNTNNTNNTNNTNNTNNTNNTNNTNNTNNTNNTNNTNNTNNTNNTNNTNNTNNTNNTNNTNNTNNTNNTNNTNNTNNTNNTNNTNNTNNTNNTNNTNNTNNTNNTNNTNNTNNTNNTNNTNNTNNTNNTNNTNNTNNTNNTNNTNNTNNTNNTNNTNNTNNTNNTNNTNNTNNTNNTNNTNNTNNTNNTNNTNNTNNT

SEQ ID NO: 20 - protein, 273 aa, Artificial Sequence
  Description of Artificial Sequence: Synthetic peptide
NNTNNTNNTNNTNNTNNTNNTNNTNNTNNTNNTNNTNNTNNTNNTNNTNNTNNTNNTNNTNNTNNTNNTNNTNNTNNTNNTNNTNNTNNTNNTNNTNNTNNTNNTNNTNNTNNTNNTNNTNNTNNTNNTNNTNNTNNTNNTNNTNNTNNTNNTNNTNNTNNTNNTNNTNNTNNTNNTNNTNNTNNTNNTNNTNNTNNTNNTNNTNNTNNTNNTNNTNNTNNTNNTNNTNNTNNTNNTNNTNNTNNTNNTNNTNNTNNTNNTNNTNNTNNTNNT

SEQ ID NO: 21 - protein, 276 aa, Artificial Sequence
  Description of Artificial Sequence: Synthetic peptide
NNTNNTNNTNNTNNTNNTNNTNNTNNTNNTNNTNNTNNTNNTNNTNNTNNTNNTNNTNNTNNTNNTNNTNNTNNTNNTNNTNNTNNTNNTNNTNNTNNTNNTNNTNNTNNTNNTNNTNNTNNTNNTNNTNNTNNTNNTNNTNNTNNTNNTNNTNNTNNTNNTNNTNNTNNTNNTNNTNNTNNTNNTNNTNNTNNTNNTNNTNNTNNTNNTNNTNNTNNTNNTNNTNNTNNTNNTNNTNNTNNTNNTNNTNNTNNTNNTNNTNNTNNTNNTNNTNNT

SEQ ID NO: 22 - protein, 279 aa, Artificial Sequence
  Description of Artificial Sequence: Synthetic peptide
NNTNNTNNTNNTNNTNNTNNTNNTNNTNNTNNTNNTNNTNNTNNTNNTNNTNNTNNTNNTNNTNNTNNTNNTNNTNNTNNTNNTNNTNNTNNTNNTNNTNNTNNTNNTNNTNNTNNTNNTNNTNNTNNTNNTNNTNNTNNTNNTNNTNNTNNTNNTNNTNNTNNTNNTNNTNNTNNTNNTNNTNNTNNTNNTNNTNNTNNTNNTNNTNNTNNTNNTNNTNNTNNTNNTNNTNNTNNTNNTNNTNNTNNTNNTNNTNNTNNTNNTNNTNNTNNTNNTNNT

SEQ ID NO: 23 - protein, 282 aa, Artificial Sequence
  Description of Artificial Sequence: Synthetic peptide
NNTNNTNNTNNTNNTNNTNNTNNTNNTNNTNNTNNTNNTNNTNNTNNTNNTNNTNNTNNTNNTNNTNNTNNTNNTNNTNNTNNTNNTNNTNNTNNTNNTNNTNNTNNTNNTNNTNNTNNTNNTNNTNNTNNTNNTNNTNNTNNTNNTNNTNNTNNTNNTNNTNNTNNTNNTNNTNNTNNTNNTNNTNNTNNTNNTNNTNNTNNTNNTNNTNNTNNTNNTNNTNNTNNTNNTNNTNNTNNTNNTNNTNNTNNTNNTNNTNNTNNTNNTNNTNNTNNTNNTNNT

SEQ ID NO: 24 - protein, 285 aa, Artificial Sequence
  Description of Artificial Sequence: Synthetic peptide
NNTNNTNNTNNTNNTNNTNNTNNTNNTNNTNNTNNTNNTNNTNNTNNTNNTNNTNNTNNTNNTNNTNNTNNTNNTNNTNNTNNTNNTNNTNNTNNTNNTNNTNNTNNTNNTNNTNNTNNTNNTNNTNNTNNTNNTNNTNNTNNTNNTNNTNNTNNTNNTNNTNNTNNTNNTNNTNNTNNTNNTNNTNNTNNTNNTNNTNNTNNTNNTNNTNNTNNTNNTNNTNNTNNTNNTNNTNNTNNTNNTNNTNNTNNTNNTNNTNNTNNTNNTNNTNNTNNTNNTNNTNNT

SEQ ID NO: 25 - protein, 288 aa, Artificial Sequence
  Description of Artificial Sequence: Synthetic peptide
NNTNNTNNTNNTNNTNNTNNTNNTNNTNNTNNTNNTNNTNNTNNTNNTNNTNNTNNTNNTNNTNNTNNTNNTNNTNNTNNTNNTNNTNNTNNTNNTNNTNNTNNTNNTNNTNNTNNTNNTNNTNNTNNTNNTNNTNNTNNTNNTNNTNNTNNTNNTNNTNNTNNTNNTNNTNNTNNTNNTNNTNNTNNTNNTNNTNNTNNTNNTNNTNNTNNTNNTNNTNNTNNTNNTNNTNNTNNTNNTNNTNNTNNTNNTNNTNNTNNTNNTNNTNNTNNTNNTNNTNNTNNTNNT

SEQ ID NO: 26 - protein, 291 aa, Artificial Sequence
  Description of Artificial Sequence: Synthetic peptide
NNTNNTNNTNNTNNTNNTNNTNNTNNTNNTNNTNNTNNTNNTNNTNNTNNTNNTNNTNNTNNTNNTNNTNNTNNTNNTNNTNNTNNTNNTNNTNNTNNTNNTNNTNNTNNTNNTNNTNNTNNTNNTNNTNNTNNTNNTNNTNNTNNTNNTNNTNNTNNTNNTNNTNNTNNTNNTNNTNNTNNTNNTNNTNNTNNTNNTNNTNNTNNTNNTNNTNNTNNTNNTNNTNNTNNTNNTNNTNNTNNTNNTNNTNNTNNTNNTNNTNNTNNTNNTNNTNNTNNTNNTNNTNNTNNT

SEQ ID NO: 27 - protein, 294 aa, Artificial Sequence
  Description of Artificial Sequence: Synthetic peptide
NNTNNTNNTNNTNNTNNTNNTNNTNNTNNTNNTNNTNNTNNTNNTNNTNNTNNTNNTNNTNNTNNTNNTNNTNNTNNTNNTNNTNNTNNTNNTNNTNNTNNTNNTNNTNNTNNTNNTNNTNNTNNTNNTNNTNNTNNTNNTNNTNNTNNTNNTNNTNNTNNTNNTNNTNNTNNTNNTNNTNNTNNTNNTNNTNNTNNTNNTNNTNNTNNTNNTNNTNNTNNTNNTNNTNNTNNTNNTNNTNNTNNTNNTNNTNNTNNTNNTNNTNNTNNTNNTNNTNNTNNTNNTNNTNNTNNT

SEQ ID NO: 28 - protein, 297 aa, Artificial Sequence
  Description of Artificial Sequence: Synthetic peptide
NNTNNTNNTNNTNNTNNTNNTNNTNNTNNTNNTNNTNNTNNTNNTNNTNNTNNTNNTNNTNNTNNTNNTNNTNNTNNTNNTNNTNNTNNTNNTNNTNNTNNTNNTNNTNNTNNTNNTNNTNNTNNTNNTNNTNNTNNTNNTNNTNNTNNTNNTNNTNNTNNTNNTNNTNNTNNTNNTNNTNNTNNTNNTNNTNNTNNTNNTNNTNNTNNTNNTNNTNNTNNTNNTNNTNNTNNTNNTNNTNNTNNTNNTNNTNNTNNTNNTNNTNNTNNTNNTNNTNNTNNTNNTNNTNNTNNTNNT

SEQ ID NO: 29 - protein, 300 aa, Artificial Sequence
  Description of Artificial Sequence: Synthetic peptide
NNTNNTNNTNNTNNTNNTNNTNNTNNTNNTNNTNNTNNTNNTNNTNNTNNTNNTNNTNNTNNTNNTNNTNNTNNTNNTNNTNNTNNTNNTNNTNNTNNTNNTNNTNNTNNTNNTNNTNNTNNTNNTNNTNNTNNTNNTNNTNNTNNTNNTNNTNNTNNTNNTNNTNNTNNTNNTNNTNNTNNTNNTNNTNNTNNTNNTNNTNNTNNTNNTNNTNNTNNTNNTNNTNNTNNTNNTNNTNNTNNTNNTNNTNNTNNTNNTNNTNNTNNTNNTNNTNNTNNTNNTNNTNNTNNTNNTNNTNNT

SEQ ID NO: 30 - protein, 303 aa, Artificial Sequence
  Description of Artificial Sequence: Synthetic peptide
NNTNNTNNTNNTNNTNNTNNTNNTNNTNNTNNTNNTNNTNNTNNTNNTNNTNNTNNTNNTNNTNNTNNTNNTNNTNNTNNTNNTNNTNNTNNTNNTNNTNNTNNTNNTNNTNNTNNTNNTNNTNNTNNTNNTNNTNNTNNTNNTNNTNNTNNTNNTNNTNNTNNTNNTNNTNNTNNTNNTNNTNNTNNTNNTNNTNNTNNTNNTNNTNNTNNTNNTNNTNNTNNTNNTNNTNNTNNTNNTNNTNNTNNTNNTNNTNNTNNTNNTNNTNNTNNTNNTNNTNNTNNTNNTNNTNNTNNTNNTNNT

SEQ ID NO: 31 - protein, 306 aa, Artificial Sequence
  Description of Artificial Sequence: Synthetic peptide
NNTNNTNNTNNTNNTNNTNNTNNTNNTNNTNNTNNTNNTNNTNNTNNTNNTNNTNNTNNTNNTNNTNNTNNTNNTNNTNNTNNTNNTNNTNNTNNTNNTNNTNNTNNTNNTNNTNNTNNTNNTNNTNNTNNTNNTNNTNNTNNTNNTNNTNNTNNTNNTNNTNNTNNTNNTNNTNNTNNTNNTNNTNNTNNTNNTNNTNNTNNTNNTNNTNNTNNTNNTNNTNNTNNTNNTNNTNNTNNTNNTNNTNNTNNTNNTNNTNNTNNTNNTNNTNNTNNTNNTNNTNNTNNTNNTNNTNNTNNTNNTNNT

SEQ ID NO: 32 - protein, 309 aa, Artificial Sequence
  Description of Artificial Sequence: Synthetic peptide
NNTNNTNNTNNTNNTNNTNNTNNTNNTNNTNNTNNTNNTNNTNNTNNTNNTNNTNNTNNTNNTNNTNNTNNTNNTNNTNNTNNTNNTNNTNNTNNTNNTNNTNNTNNTNNTNNTNNTNNTNNTNNTNNTNNTNNTNNTNNTNNTNNTNNTNNTNNTNNTNNTNNTNNTNNTNNTNNTNNTNNTNNTNNTNNTNNTNNTNNTNNTNNTNNTNNTNNTNNTNNTNNTNNTNNTNNTNNTNNTNNTNNTNNTNNTNNTNNTNNTNNTNNTNNTNNTNNTNNTNNTNNTNNTNNTNNTNNTNNTNNTNNTNNT

SEQ ID NO: 33 - protein, 312 aa, Artificial Sequence
  Description of Artificial Sequence: Synthetic peptide
NNTNNTNNTNNTNNTNNTNNTNNTNNTNNTNNTNNTNNTNNTNNTNNTNNTNNTNNTNNTNNTNNTNNTNNTNNTNNTNNTNNTNNTNNTNNTNNTNNTNNTNNTNNTNNTNNTNNTNNTNNTNNTNNTNNTNNTNNTNNTNNTNNTNNTNNTNNTNNTNNTNNTNNTNNTNNTNNTNNTNNTNNTNNTNNTNNTNNTNNTNNTNNTNNTNNTNNTNNTNNTNNTNNTNNTNNTNNTNNTNNTNNTNNTNNTNNTNNTNNTNNTNNTNNTNNTNNTNNTNNTNNTNNTNNTNNTNNTNNTNNTNNTNNTNNT

SEQ ID NO: 34 - protein, 315 aa, Artificial Sequence
  Description of Artificial Sequence: Synthetic peptide
NNTNNTNNTNNTNNTNNTNNTNNTNNTNNTNNTNNTNNTNNTNNTNNTNNTNNTNNTNNTNNTNNTNNTNNTNNTNNTNNTNNTNNTNNTNNTNNTNNTNNTNNTNNTNNTNNTNNTNNTNNTNNTNNTNNTNNTNNTNNTNNTNNTNNTNNTNNTNNTNNTNNTNNTNNTNNTNNTNNTNNTNNTNNTNNTNNTNNTNNTNNTNNTNNTNNTNNTNNTNNTNNTNNTNNTNNTNNTNNTNNTNNTNNTNNTNNTNNTNNTNNTNNTNNTNNTNNTNNTNNTNNTNNTNNTNNTNNTNNTNNTNNTNNTNNTNNT

SEQ ID NO: 35 - protein, 318 aa, Artificial Sequence
  Description of Artificial Sequence: Synthetic peptide
NNTNNTNNTNNTNNTNNTNNTNNTNNTNNTNNTNNTNNTNNTNNTNNTNNTNNTNNTNNTNNTNNTNNTNNTNNTNNTNNTNNTNNTNNTNNTNNTNNTNNTNNTNNTNNTNNTNNTNNTNNTNNTNNTNNTNNTNNTNNTNNTNNTNNTNNTNNTNNTNNTNNTNNTNNTNNTNNTNNTNNTNNTNNTNNTNNTNNTNNTNNTNNTNNTNNTNNTNNTNNTNNTNNTNNTNNTNNTNNTNNTNNTNNTNNTNNTNNTNNTNNTNNTNNTNNTNNTNNTNNTNNTNNTNNTNNTNNTNNTNNTNNTNNTNNTNNTNNT

SEQ ID NO: 36 - protein, 321 aa, Artificial Sequence
  Description of Artificial Sequence: Synthetic peptide
NNTNNTNNTNNTNNTNNTNNTNNTNNTNNTNNTNNTNNTNNTNNTNNTNNTNNTNNTNNTNNTNNTNNTNNTNNTNNTNNTNNTNNTNNTNNTNNTNNTNNTNNTNNTNNTNNTNNTNNTNNTNNTNNTNNTNNTNNTNNTNNTNNTNNTNNTNNTNNTNNTNNTNNTNNTNNTNNTNNTNNTNNTNNTNNTNNTNNTNNTNNTNNTNNTNNTNNTNNTNNTNNTNNTNNTNNTNNTNNTNNTNNTNNTNNTNNTNNTNNTNNTNNTNNTNNTNNTNNTNNTNNTNNTNNTNNTNNTNNTNNTNNTNNTNNTNNTNNTNNT

SEQ ID NO: 37 - protein, 324 aa, Artificial Sequence
  Description of Artificial Sequence: Synthetic peptide
NNTNNTNNTNNTNNTNNTNNTNNTNNTNNTNNTNNTNNTNNTNNTNNTNNTNNTNNTNNTNNTNNTNNTNNTNNTNNTNNTNNTNNTNNTNNTNNTNNTNNTNNTNNTNNTNNTNNTNNTNNTNNTNNTNNTNNTNNTNNTNNTNNTNNTNNTNNTNNTNNTNNTNNTNNTNNTNNTNNTNNTNNTNNTNNTNNTNNTNNTNNTNNTNNTNNTNNTNNTNNTNNTNNTNNTNNTNNTNNTNNTNNTNNTNNTNNTNNTNNTNNTNNTNNTNNTNNTNNTNNTNNTNNTNNTNNTNNTNNTNNTNNTNNTNNTNNTNNTNNTNNT

SEQ ID NO: 38 - protein, 327 aa, Artificial Sequence
  Description of Artificial Sequence: Synthetic peptide
NNTNNTNNTNNTNNTNNTNNTNNTNNTNNTNNTNNTNNTNNTNNTNNTNNTNNTNNTNNTNNTNNTNNTNNTNNTNNTNNTNNTNNTNNTNNTNNTNNTNNTNNTNNTNNTNNTNNTNNTNNTNNTNNTNNTNNTNNTNNTNNTNNTNNTNNTNNTNNTNNTNNTNNTNNTNNTNNTNNTNNTNNTNNTNNTNNTNNTNNTNNTNNTNNTNNTNNTNNTNNTNNTNNTNNTNNTNNTNNTNNTNNTNNTNNTNNTNNTNNTNNTNNTNNTNNTNNTNNTNNTNNTNNTNNTNNTNNTNNTNNTNNTNNTNNTNNTNNTNNTNNTNNT

SEQ ID NO: 39 - protein, 330 aa, Artificial Sequence
  Description of Artificial Sequence: Synthetic peptide
NNTNNTNNTNNTNNTNNTNNTNNTNNTNNTNNTNNTNNTNNTNNTNNTNNTNNTNNTNNTNNTNNTNNTNNTNNTNNTNNTNNTNNTNNTNNTNNTNNTNNTNNTNNTNNTNNTNNTNNTNNTNNTNNTNNTNNTNNTNNTNNTNNTNNTNNTNNTNNTNNTNNTNNTNNTNNTNNTNNTNNTNNTNNTNNTNNTNNTNNTNNTNNTNNTNNTNNTNNTNNTNNTNNTNNTNNTNNTNNTNNTNNTNNTNNTNNTNNTNNTNNTNNTNNTNNTNNTNNTNNTNNTNNTNNTNNTNNTNNTNNTNNTNNTNNTNNTNNTNNTNNTNNTNNT

SEQ ID NO: 40 - protein, 333 aa, Artificial Sequence
  Description of Artificial Sequence: Synthetic peptide
NNTNNTNNTNNTNNTNNTNNTNNTNNTNNTNNTNNTNNTNNTNNTNNTNNTNNTNNTNNTNNTNNTNNTNNTNNTNNTNNTNNTNNTNNTNNTNNTNNTNNTNNTNNTNNTNNTNNTNNTNNTNNTNNTNNTNNTNNTNNTNNTNNTNNTNNTNNTNNTNNTNNTNNTNNTNNTNNTNNTNNTNNTNNTNNTNNTNNTNNTNNTNNTNNTNNTNNTNNTNNTNNTNNTNNTNNTNNTNNTNNTNNTNNTNNTNNTNNTNNTNNTNNTNNTNNTNNTNNTNNTNNTNNTNNTNNTNNTNNTNNTNNTNNTNNTNNTNNTNNTNNTNNTNNTNNT

SEQ ID NO: 41 - protein, 336 aa, Artificial Sequence
  Description of Artificial Sequence: Synthetic peptide
NNTNNTNNTNNTNNTNNTNNTNNTNNTNNTNNTNNTNNTNNTNNTNNTNNTNNTNNTNNTNNTNNTNNTNNTNNTNNTNNTNNTNNTNNTNNTNNTNNTNNTNNTNNTNNTNNTNNTNNTNNTNNTNNTNNTNNTNNTNNTNNTNNTNNTNNTNNTNNTNNTNNTNNTNNTNNTNNTNNTNNTNNTNNTNNTNNTNNTNNTNNTNNTNNTNNTNNTNNTNNTNNTNNTNNTNNTNNTNNTNNTNNTNNTNNTNNTNNTNNTNNTNNTNNTNNTNNTNNTNNTNNTNNTNNTNNTNNTNNTNNTNNTNNTNNTNNTNNTNNTNNTNNTNNTNNTNNT

SEQ ID NO: 42 - protein, 339 aa, Artificial Sequence
  Description of Artificial Sequence: Synthetic peptide
NNTNNTNNTNNTNNTNNTNNTNNTNNTNNTNNTNNTNNTNNTNNTNNTNNTNNTNNTNNTNNTNNTNNTNNTNNTNNTNNTNNTNNTNNTNNTNNTNNTNNTNNTNNTNNTNNTNNTNNTNNTNNTNNTNNTNNTNNTNNTNNTNNTNNTNNTNNTNNTNNTNNTNNTNNTNNTNNTNNTNNTNNTNNTNNTNNTNNTNNTNNTNNTNNTNNTNNTNNTNNTNNTNNTNNTNNTNNTNNTNNTNNTNNTNNTNNTNNTNNTNNTNNTNNTNNTNNTNNTNNTNNTNNTNNTNNTNNTNNTNNTNNTNNTNNTNNTNNTNNTNNTNNTNNTNNTNNTNNT

SEQ ID NO: 43 - protein, 342 aa, Artificial Sequence
  Description of Artificial Sequence: Synthetic peptide
NNTNNTNNTNNTNNTNNTNNTNNTNNTNNTNNTNNTNNTNNTNNTNNTNNTNNTNNTNNTNNTNNTNNTNNTNNTNNTNNTNNTNNTNNTNNTNNTNNTNNTNNTNNTNNTNNTNNTNNTNNTNNTNNTNNTNNTNNTNNTNNTNNTNNTNNTNNTNNTNNTNNTNNTNNTNNTNNTNNTNNTNNTNNTNNTNNTNNTNNTNNTNNTNNTNNTNNTNNTNNTNNTNNTNNTNNTNNTNNTNNTNNTNNTNNTNNTNNTNNTNNTNNTNNTNNTNNTNNTNNTNNTNNTNNTNNTNNTNNTNNTNNTNNTNNTNNTNNTNNTNNTNNTNNTNNTNNTNNTNNT

SEQ ID NO: 44 - protein, 345 aa, Artificial Sequence
  Description of Artificial Sequence: Synthetic peptide
NNTNNTNNTNNTNNTNNTNNTNNTNNTNNTNNTNNTNNTNNTNNTNNTNNTNNTNNTNNTNNTNNTNNTNNTNNTNNTNNTNNTNNTNNTNNTNNTNNTNNTNNTNNTNNTNNTNNTNNTNNTNNTNNTNNTNNTNNTNNTNNTNNTNNTNNTNNTNNTNNTNNTNNTNNTNNTNNTNNTNNTNNTNNTNNTNNTNNTNNTNNTNNTNNTNNTNNTNNTNNTNNTNNTNNTNNTNNTNNTNNTNNTNNTNNTNNTNNTNNTNNTNNTNNTNNTNNTNNTNNTNNTNNTNNTNNTNNTNNTNNTNNTNNTNNTNNTNNTNNTNNTNNTNNTNNTNNTNNTNNTNNT

SEQ ID NO: 45 - protein, 348 aa, Artificial Sequence
  Description of Artificial Sequence: Synthetic peptide
NNTNNTNNTNNTNNTNNTNNTNNTNNTNNTNNTNNTNNTNNTNNTNNTNNTNNTNNTNNTNNTNNTNNTNNTNNTNNTNNTNNTNNTNNTNNTNNTNNTNNTNNTNNTNNTNNTNNTNNTNNTNNTNNTNNTNNTNNTNNTNNTNNTNNTNNTNNTNNTNNTNNTNNTNNTNNTNNTNNTNNTNNTNNTNNTNNTNNTNNTNNTNNTNNTNNTNNTNNTNNTNNTNNTNNTNNTNNTNNTNNTNNTNNTNNTNNTNNTNNTNNTNNTNNTNNTNNTNNTNNTNNTNNTNNTNNTNNTNNTNNTNNTNNTNNTNNTNNTNNTNNTNNTNNTNNTNNTNNTNNTNNTNNT

SEQ ID NO: 46 - protein, 351 aa, Artificial Sequence
  Description of Artificial Sequence: Synthetic peptide
NNTNNTNNTNNTNNTNNTNNTNNTNNTNNTNNTNNTNNTNNTNNTNNTNNTNNTNNTNNTNNTNNTNNTNNTNNTNNTNNTNNTNNTNNTNNTNNTNNTNNTNNTNNTNNTNNTNNTNNTNNTNNTNNTNNTNNTNNTNNTNNTNNTNNTNNTNNTNNTNNTNNTNNTNNTNNTNNTNNTNNTNNTNNTNNTNNTNNTNNTNNTNNTNNTNNTNNTNNTNNTNNTNNTNNTNNTNNTNNTNNTNNTNNTNNTNNTNNTNNTNNTNNTNNTNNTNNTNNTNNTNNTNNTNNTNNTNNTNNTNNTNNTNNTNNTNNTNNTNNTNNTNNTNNTNNTNNTNNTNNTNNTNNTNNT

SEQ ID NO: 47 - protein, 354 aa, Artificial Sequence
  Description of Artificial Sequence: Synthetic peptide
NNTNNTNNTNNTNNTNNTNNTNNTNNTNNTNNTNNTNNTNNTNNTNNTNNTNNTNNTNNTNNTNNTNNTNNTNNTNNTNNTNNTNNTNNTNNTNNTNNTNNTNNTNNTNNTNNTNNTNNTNNTNNTNNTNNTNNTNNTNNTNNTNNTNNTNNTNNTNNTNNTNNTNNTNNTNNTNNTNNTNNTNNTNNTNNTNNTNNTNNTNNTNNTNNTNNTNNTNNTNNTNNTNNTNNTNNTNNTNNTNNTNNTNNTNNTNNTNNTNNTNNTNNTNNTNNTNNTNNTNNTNNTNNTNNTNNTNNTNNTNNTNNTNNTNNTNNTNNTNNTNNTNNTNNTNNTNNTNNTNNTNNTNNTNNTNNT

SEQ ID NO: 48 - protein, 357 aa, Artificial Sequence
  Description of Artificial Sequence: Synthetic peptide
NNTNNTNNTNNTNNTNNTNNTNNTNNTNNTNNTNNTNNTNNTNNTNNTNNTNNTNNTNNTNNTNNTNNTNNTNNTNNTNNTNNTNNTNNTNNTNNTNNTNNTNNTNNTNNTNNTNNTNNTNNTNNTNNTNNTNNTNNTNNTNNTNNTNNTNNTNNTNNTNNTNNTNNTNNTNNTNNTNNTNNTNNTNNTNNTNNTNNTNNTNNTNNTNNTNNTNNTNNTNNTNNTNNTNNTNNTNNTNNTNNTNNTNNTNNTNNTNNTNNTNNTNNTNNTNNTNNTNNTNNTNNTNNTNNTNNTNNTNNTNNTNNTNNTNNTNNTNNTNNTNNTNNTNNTNNTNNTNNTNNTNNTNNTNNTNNTNNT

SEQ ID NO: 49 - protein, 360 aa, Artificial Sequence
  Description of Artificial Sequence: Synthetic peptide
NNTNNTNNTNNTNNTNNTNNTNNTNNTNNTNNTNNTNNTNNTNNTNNTNNTNNTNNTNNTNNTNNTNNTNNTNNTNNTNNTNNTNNTNNTNNTNNTNNTNNTNNTNNTNNTNNTNNTNNTNNTNNTNNTNNTNNTNNTNNTNNTNNTNNTNNTNNTNNTNNTNNTNNTNNTNNTNNTNNTNNTNNTNNTNNTNNTNNTNNTNNTNNTNNTNNTNNTNNTNNTNNTNNTNNTNNTNNTNNTNNTNNTNNTNNTNNTNNTNNTNNTNNTNNTNNTNNTNNTNNTNNTNNTNNTNNTNNTNNTNNTNNTNNTNNTNNTNNTNNTNNTNNTNNTNNTNNTNNTNNTNNTNNTNNTNNTNNTNNT

SEQ ID NO: 50 - protein, 363 aa, Artificial Sequence
  Description of Artificial Sequence: Synthetic peptide
NNTNNTNNTNNTNNTNNTNNTNNTNNTNNTNNTNNTNNTNNTNNTNNTNNTNNTNNTNNTNNTNNTNNTNNTNNTNNTNNTNNTNNTNNTNNTNNTNNTNNTNNTNNTNNTNNTNNTNNTNNTNNTNNTNNTNNTNNTNNTNNTNNTNNTNNTNNTNNTNNTNNTNNTNNTNNTNNTNNTNNTNNTNNTNNTNNTNNTNNTNNTNNTNNTNNTNNTNNTNNTNNTNNTNNTNNTNNTNNTNNTNNTNNTNNTNNTNNTNNTNNTNNTNNTNNTNNTNNTNNTNNTNNTNNTNNTNNTNNTNNTNNTNNTNNTNNTNNTNNTNNTNNTNNTNNTNNTNNTNNTNNTNNTNNTNNTNNTNNTNNT

SEQ ID NO: 51 - protein, 366 aa, Artificial Sequence
  Description of Artificial Sequence: Synthetic peptide
NNTNNTNNTNNTNNTNNTNNTNNTNNTNNTNNTNNTNNTNNTNNTNNTNNTNNTNNTNNTNNTNNTNNTNNTNNTNNTNNTNNTNNTNNTNNTNNTNNTNNTNNTNNTNNTNNTNNTNNTNNTNNTNNTNNTNNTNNTNNTNNTNNTNNTNNTNNTNNTNNTNNTNNTNNTNNTNNTNNTNNTNNTNNTNNTNNTNNTNNTNNTNNTNNTNNTNNTNNTNNTNNTNNTNNTNNTNNTNNTNNTNNTNNTNNTNNTNNTNNTNNTNNTNNTNNTNNTNNTNNTNNTNNTNNTNNTNNTNNTNNTNNTNNTNNTNNTNNTNNTNNTNNTNNTNNTNNTNNTNNTNNTNNTNNTNNTNNTNNTNNTNNT

SEQ ID NO: 52 - protein, 369 aa, Artificial Sequence
  Description of Artificial Sequence: Synthetic peptide
NNTNNTNNTNNTNNTNNTNNTNNTNNTNNTNNTNNTNNTNNTNNTNNTNNTNNTNNTNNTNNTNNTNNTNNTNNTNNTNNTNNTNNTNNTNNTNNTNNTNNTNNTNNTNNTNNTNNTNNTNNTNNTNNTNNTNNTNNTNNTNNTNNTNNTNNTNNTNNTNNTNNTNNTNNTNNTNNTNNTNNTNNTNNTNNTNNTNNTNNTNNTNNTNNTNNTNNTNNTNNTNNTNNTNNTNNTNNTNNTNNTNNTNNTNNTNNTNNTNNTNNTNNTNNTNNTNNTNNTNNTNNTNNTNNTNNTNNTNNTNNTNNTNNTNNTNNTNNTNNTNNTNNTNNTNNTNNTNNTNNTNNTNNTNNTNNTNNTNNTNNTNNTNNT

SEQ ID NO: 53 - protein, 372 aa, Artificial Sequence
  Description of Artificial Sequence: Synthetic peptide
NNTNNTNNTNNTNNTNNTNNTNNTNNTNNTNNTNNTNNTNNTNNTNNTNNTNNTNNTNNTNNTNNTNNTNNTNNTNNTNNTNNTNNTNNTNNTNNTNNTNNTNNTNNTNNTNNTNNTNNTNNTNNTNNTNNTNNTNNTNNTNNTNNTNNTNNTNNTNNTNNTNNTNNTNNTNNTNNTNNTNNTNNTNNTNNTNNTNNTNNTNNTNNTNNTNNTNNTNNTNNTNNTNNTNNTNNTNNTNNTNNTNNTNNTNNTNNTNNTNNTNNTNNTNNTNNTNNTNNTNNTNNTNNTNNTNNTNNTNNTNNTNNTNNTNNTNNTNNTNNTNNTNNTNNTNNTNNTNNTNNTNNTNNTNNTNNTNNTNNTNNTNNTNNTNNT

SEQ ID NO: 54 - protein, 375 aa, Artificial Sequence
  Description of Artificial Sequence: Synthetic peptide
NNTNNTNNTNNTNNTNNTNNTNNTNNTNNTNNTNNTNNTNNTNNTNNTNNTNNTNNTNNTNNTNNTNNTNNTNNTNNTNNTNNTNNTNNTNNTNNTNNTNNTNNTNNTNNTNNTNNTNNTNNTNNTNNTNNTNNTNNTNNTNNTNNTNNTNNTNNTNNTNNTNNTNNTNNTNNTNNTNNTNNTNNTNNTNNTNNTNNTNNTNNTNNTNNTNNTNNTNNTNNTNNTNNTNNTNNTNNTNNTNNTNNTNNTNNTNNTNNTNNTNNTNNTNNTNNTNNTNNTNNTNNTNNTNNTNNTNNTNNTNNTNNTNNTNNTNNTNNTNNTNNTNNTNNTNNTNNTNNTNNTNNTNNTNNTNNTNNTNNTNNTNNTNNTNNTNNT

SEQ ID NO: 55 - protein, 378 aa, Artificial Sequence
  Description of Artificial Sequence: Synthetic peptide
NNTNNTNNTNNTNNTNNTNNTNNTNNTNNTNNTNNTNNTNNTNNTNNTNNTNNTNNTNNTNNTNNTNNTNNTNNTNNTNNTNNTNNTNNTNNTNNTNNTNNTNNTNNTNNTNNTNNTNNTNNTNNTNNTNNTNNTNNTNNTNNTNNTNNTNNTNNTNNTNNTNNTNNTNNTNNTNNTNNTNNTNNTNNTNNTNNTNNTNNTNNTNNTNNTNNTNNTNNTNNTNNTNNTNNTNNTNNTNNTNNTNNTNNTNNTNNTNNTNNTNNTNNTNNTNNTNNTNNTNNTNNTNNTNNTNNTNNTNNTNNTNNTNNTNNTNNTNNTNNTNNTNNTNNTNNTNNTNNTNNTNNTNNTNNTNNTNNTNNTNNTNNTNNTNNTNNTNNT

SEQ ID NO: 56 - protein, 381 aa, Artificial Sequence
  Description of Artificial Sequence: Synthetic peptide
NNTNNTNNTNNTNNTNNTNNTNNTNNTNNTNNTNNTNNTNNTNNTNNTNNTNNTNNTNNTNNTNNTNNTNNTNNTNNTNNTNNTNNTNNTNNTNNTNNTNNTNNTNNTNNTNNTNNTNNTNNTNNTNNTNNTNNTNNTNNTNNTNNTNNTNNTNNTNNTNNTNNTNNTNNTNNTNNTNNTNNTNNTNNTNNTNNTNNTNNTNNTNNTNNTNNTNNTNNTNNTNNTNNTNNTNNTNNTNNTNNTNNTNNTNNTNNTNNTNNTNNTNNTNNTNNTNNTNNTNNTNNTNNTNNTNNTNNTNNTNNTNNTNNTNNTNNTNNTNNTNNTNNTNNTNNTNNTNNTNNTNNTNNTNNTNNTNNTNNTNNTNNTNNTNNTNNTNNTNNT

SEQ ID NO: 57 - protein, 384 aa, Artificial Sequence
  Description of Artificial Sequence: Synthetic peptide
NNTNNTNNTNNTNNTNNTNNTNNTNNTNNTNNTNNTNNTNNTNNTNNTNNTNNTNNTNNTNNTNNTNNTNNTNNTNNTNNTNNTNNTNNTNNTNNTNNTNNTNNTNNTNNTNNTNNTNNTNNTNNTNNTNNTNNTNNTNNTNNTNNTNNTNNTNNTNNTNNTNNTNNTNNTNNTNNTNNTNNTNNTNNTNNTNNTNNTNNTNNTNNTNNTNNTNNTNNTNNTNNTNNTNNTNNTNNTNNTNNTNNTNNTNNTNNTNNTNNTNNTNNTNNTNNTNNTNNTNNTNNTNNTNNTNNTNNTNNTNNTNNTNNTNNTNNTNNTNNTNNTNNTNNTNNTNNTNNTNNTNNTNNTNNTNNTNNTNNTNNTNNTNNTNNTNNTNNTNNTNNT

SEQ ID NO: 58 - protein, 387 aa, Artificial Sequence
  Description of Artificial Sequence: Synthetic peptide
NNTNNTNNTNNTNNTNNTNNTNNTNNTNNTNNTNNTNNTNNTNNTNNTNNTNNTNNTNNTNNTNNTNNTNNTNNTNNTNNTNNTNNTNNTNNTNNTNNTNNTNNTNNTNNTNNTNNTNNTNNTNNTNNTNNTNNTNNTNNTNNTNNTNNTNNTNNTNNTNNTNNTNNTNNTNNTNNTNNTNNTNNTNNTNNTNNTNNTNNTNNTNNTNNTNNTNNTNNTNNTNNTNNTNNTNNTNNTNNTNNTNNTNNTNNTNNTNNTNNTNNTNNTNNTNNTNNTNNTNNTNNTNNTNNTNNTNNTNNTNNTNNTNNTNNTNNTNNTNNTNNTNNTNNTNNTNNTNNTNNTNNTNNTNNTNNTNNTNNTNNTNNTNNTNNTNNTNNTNNTNNTNNT

SEQ ID NO: 59 - protein, 390 aa, Artificial Sequence
  Description of Artificial Sequence: Synthetic peptide
NNTNNTNNTNNTNNTNNTNNTNNTNNTNNTNNTNNTNNTNNTNNTNNTNNTNNTNNTNNTNNTNNTNNTNNTNNTNNTNNTNNTNNTNNTNNTNNTNNTNNTNNTNNTNNTNNTNNTNNTNNTNNTNNTNNTNNTNNTNNTNNTNNTNNTNNTNNTNNTNNTNNTNNTNNTNNTNNTNNTNNTNNTNNTNNTNNTNNTNNTNNTNNTNNTNNTNNTNNTNNTNNTNNTNNTNNTNNTNNTNNTNNTNNTNNTNNTNNTNNTNNTNNTNNTNNTNNTNNTNNTNNTNNTNNTNNTNNTNNTNNTNNTNNTNNTNNTNNTNNTNNTNNTNNTNNTNNTNNTNNTNNTNNTNNTNNTNNTNNTNNTNNTNNTNNTNNTNNTNNTNNTNNTNNT

SEQ ID NO: 60 - protein, 393 aa, Artificial Sequence
  Description of Artificial Sequence: Synthetic peptide
NNTNNTNNTNNTNNTNNTNNTNNTNNTNNTNNTNNTNNTNNTNNTNNTNNTNNTNNTNNTNNTNNTNNTNNTNNTNNTNNTNNTNNTNNTNNTNNTNNTNNTNNTNNTNNTNNTNNTNNTNNTNNTNNTNNTNNTNNTNNTNNTNNTNNTNNTNNTNNTNNTNNTNNTNNTNNTNNTNNTNNTNNTNNTNNTNNTNNTNNTNNTNNTNNTNNTNNTNNTNNTNNTNNTNNTNNTNNTNNTNNTNNTNNTNNTNNTNNTNNTNNTNNTNNTNNTNNTNNTNNTNNTNNTNNTNNTNNTNNTNNTNNTNNTNNTNNTNNTNNTNNTNNTNNTNNTNNTNNTNNTNNTNNTNNTNNTNNTNNTNNTNNTNNTNNTNNTNNTNNTNNTNNTNNTNNT

SEQ ID NO: 61 - protein, 396 aa, Artificial Sequence
  Description of Artificial Sequence: Synthetic peptide
NNTNNTNNTNNTNNTNNTNNTNNTNNTNNTNNTNNTNNTNNTNNTNNTNNTNNTNNTNNTNNTNNTNNTNNTNNTNNTNNTNNTNNTNNTNNTNNTNNTNNTNNTNNTNNTNNTNNTNNTNNTNNTNNTNNTNNTNNTNNTNNTNNTNNTNNTNNTNNTNNTNNTNNTNNTNNTNNTNNTNNTNNTNNTNNTNNTNNTNNTNNTNNTNNTNNTNNTNNTNNTNNTNNTNNTNNTNNTNNTNNTNNTNNTNNTNNTNNTNNTNNTNNTNNTNNTNNTNNTNNTNNTNNTNNTNNTNNTNNTNNTNNTNNTNNTNNTNNTNNTNNTNNTNNTNNTNNTNNTNNTNNTNNTNNTNNTNNTNNTNNTNNTNNTNNTNNTNNTNNTNNTNNTNNTNNTNNT

SEQ ID NO: 62 - protein, 399 aa, Artificial Sequence
  Description of Artificial Sequence: Synthetic peptide
NNTNNTNNTNNTNNTNNTNNTNNTNNTNNTNNTNNTNNTNNTNNTNNTNNTNNTNNTNNTNNTNNTNNTNNTNNTNNTNNTNNTNNTNNTNNTNNTNNTNNTNNTNNTNNTNNTNNTNNTNNTNNTNNTNNTNNTNNTNNTNNTNNTNNTNNTNNTNNTNNTNNTNNTNNTNNTNNTNNTNNTNNTNNTNNTNNTNNTNNTNNTNNTNNTNNTNNTNNTNNTNNTNNTNNTNNTNNTNNTNNTNNTNNTNNTNNTNNTNNTNNTNNTNNTNNTNNTNNTNNTNNTNNTNNTNNTNNTNNTNNTNNTNNTNNTNNTNNTNNTNNTNNTNNTNNTNNTNNTNNTNNTNNTNNTNNTNNTNNTNNTNNTNNTNNTNNTNNTNNTNNTNNTNNTNNTNNTNNT

SEQ ID NO: 63 - protein, 402 aa, Artificial Sequence
  Description of Artificial Sequence: Synthetic peptide
NNTNNTNNTNNTNNTNNTNNTNNTNNTNNTNNTNNTNNTNNTNNTNNTNNTNNTNNTNNTNNTNNTNNTNNTNNTNNTNNTNNTNNTNNTNNTNNTNNTNNTNNTNNTNNTNNTNNTNNTNNTNNTNNTNNTNNTNNTNNTNNTNNTNNTNNTNNTNNTNNTNNTNNTNNTNNTNNTNNTNNTNNTNNTNNTNNTNNTNNTNNTNNTNNTNNTNNTNNTNNTNNTNNTNNTNNTNNTNNTNNTNNTNNTNNTNNTNNTNNTNNTNNTNNTNNTNNTNNTNNTNNTNNTNNTNNTNNTNNTNNTNNTNNTNNTNNTNNTNNTNNTNNTNNTNNTNNTNNTNNTNNTNNTNNTNNTNNTNNTNNTNNTNNTNNTNNTNNTNNTNNTNNTNNTNNTNNTNNTNNT

SEQ ID NO: 64 - protein, 405 aa, Artificial Sequence
  Description of Artificial Sequence: Synthetic peptide
NNTNNTNNTNNTNNTNNTNNTNNTNNTNNTNNTNNTNNTNNTNNTNNTNNTNNTNNTNNTNNTNNTNNTNNTNNTNNTNNTNNTNNTNNTNNTNNTNNTNNTNNTNNTNNTNNTNNTNNTNNTNNTNNTNNTNNTNNTNNTNNTNNTNNTNNTNNTNNTNNTNNTNNTNNTNNTNNTNNTNNTNNTNNTNNTNNTNNTNNTNNTNNTNNTNNTNNTNNTNNTNNTNNTNNTNNTNNTNNTNNTNNTNNTNNTNNTNNTNNTNNTNNTNNTNNTNNTNNTNNTNNTNNTNNTNNTNNTNNTNNTNNTNNTNNTNNTNNTNNTNNTNNTNNTNNTNNTNNTNNTNNTNNTNNTNNTNNTNNTNNTNNTNNTNNTNNTNNTNNTNNTNNTNNTNNTNNTNNTNNTNNT

SEQ ID NO: 65 - protein, 408 aa, Artificial Sequence
  Description of Artificial Sequence: Synthetic peptide
NNTNNTNNTNNTNNTNNTNNTNNTNNTNNTNNTNNTNNTNNTNNTNNTNNTNNTNNTNNTNNTNNTNNTNNTNNTNNTNNTNNTNNTNNTNNTNNTNNTNNTNNTNNTNNTNNTNNTNNTNNTNNTNNTNNTNNTNNTNNTNNTNNTNNTNNTNNTNNTNNTNNTNNTNNTNNTNNTNNTNNTNNTNNTNNTNNTNNTNNTNNTNNTNNTNNTNNTNNTNNTNNTNNTNNTNNTNNTNNTNNTNNTNNTNNTNNTNNTNNTNNTNNTNNTNNTNNTNNTNNTNNTNNTNNTNNTNNTNNTNNTNNTNNTNNTNNTNNTNNTNNTNNTNNTNNTNNTNNTNNTNNTNNTNNTNNTNNTNNTNNTNNTNNTNNTNNTNNTNNTNNTNNTNNTNNTNNTNNTNNTNNTNNT

SEQ ID NO: 66 - protein, 411 aa, Artificial Sequence
  Description of Artificial Sequence: Synthetic peptide
NNTNNTNNTNNTNNTNNTNNTNNTNNTNNTNNTNNTNNTNNTNNTNNTNNTNNTNNTNNTNNTNNTNNTNNTNNTNNTNNTNNTNNTNNTNNTNNTNNTNNTNNTNNTNNTNNTNNTNNTNNTNNTNNTNNTNNTNNTNNTNNTNNTNNTNNTNNTNNTNNTNNTNNTNNTNNTNNTNNTNNTNNTNNTNNTNNTNNTNNTNNTNNTNNTNNTNNTNNTNNTNNTNNTNNTNNTNNTNNTNNTNNTNNTNNTNNTNNTNNTNNTNNTNNTNNTNNTNNTNNTNNTNNTNNTNNTNNTNNTNNTNNTNNTNNTNNTNNTNNTNNTNNTNNTNNTNNTNNTNNTNNTNNTNNTNNTNNTNNTNNTNNTNNTNNTNNTNNTNNTNNTNNTNNTNNTNNTNNTNNTNNTNNTNNT

SEQ ID NO: 67 - protein, 414 aa, Artificial Sequence
  Description of Artificial Sequence: Synthetic peptide
NNTNNTNNTNNTNNTNNTNNTNNTNNTNNTNNTNNTNNTNNTNNTNNTNNTNNTNNTNNTNNTNNTNNTNNTNNTNNTNNTNNTNNTNNTNNTNNTNNTNNTNNTNNTNNTNNTNNTNNTNNTNNTNNTNNTNNTNNTNNTNNTNNTNNTNNTNNTNNTNNTNNTNNTNNTNNTNNTNNTNNTNNTNNTNNTNNTNNTNNTNNTNNTNNTNNTNNTNNTNNTNNTNNTNNTNNTNNTNNTNNTNNTNNTNNTNNTNNTNNTNNTNNTNNTNNTNNTNNTNNTNNTNNTNNTNNTNNTNNTNNTNNTNNTNNTNNTNNTNNTNNTNNTNNTNNTNNTNNTNNTNNTNNTNNTNNTNNTNNTNNTNNTNNTNNTNNTNNTNNTNNTNNTNNTNNTNNTNNTNNTNNTNNTNNTNNT

SEQ ID NO: 68 - protein, 417 aa, Artificial Sequence
  Description of Artificial Sequence: Synthetic peptide
NNTNNTNNTNNTNNTNNTNNTNNTNNTNNTNNTNNTNNTNNTNNTNNTNNTNNTNNTNNTNNTNNTNNTNNTNNTNNTNNTNNTNNTNNTNNTNNTNNTNNTNNTNNTNNTNNTNNTNNTNNTNNTNNTNNTNNTNNTNNTNNTNNTNNTNNTNNTNNTNNTNNTNNTNNTNNTNNTNNTNNTNNTNNTNNTNNTNNTNNTNNTNNTNNTNNTNNTNNTNNTNNTNNTNNTNNTNNTNNTNNTNNTNNTNNTNNTNNTNNTNNTNNTNNTNNTNNTNNTNNTNNTNNTNNTNNTNNTNNTNNTNNTNNTNNTNNTNNTNNTNNTNNTNNTNNTNNTNNTNNTNNTNNTNNTNNTNNTNNTNNTNNTNNTNNTNNTNNTNNTNNTNNTNNTNNTNNTNNTNNTNNTNNTNNTNNTNNT

SEQ ID NO: 69 - protein, 420 aa, Artificial Sequence
  Description of Artificial Sequence: Synthetic peptide
NNTNNTNNTNNTNNTNNTNNTNNTNNTNNTNNTNNTNNTNNTNNTNNTNNTNNTNNTNNTNNTNNTNNTNNTNNTNNTNNTNNTNNTNNTNNTNNTNNTNNTNNTNNTNNTNNTNNTNNTNNTNNTNNTNNTNNTNNTNNTNNTNNTNNTNNTNNTNNTNNTNNTNNTNNTNNTNNTNNTNNTNNTNNTNNTNNTNNTNNTNNTNNTNNTNNTNNTNNTNNTNNTNNTNNTNNTNNTNNTNNTNNTNNTNNTNNTNNTNNTNNTNNTNNTNNTNNTNNTNNTNNTNNTNNTNNTNNTNNTNNTNNTNNTNNTNNTNNTNNTNNTNNTNNTNNTNNTNNTNNTNNTNNTNNTNNTNNTNNTNNTNNTNNTNNTNNTNNTNNTNNTNNTNNTNNTNNTNNTNNTNNTNNTNNTNNTNNTNNT

SEQ ID NO: 70 - protein, 423 aa, Artificial Sequence
  Description of Artificial Sequence: Synthetic peptide
NNTNNTNNTNNTNNTNNTNNTNNTNNTNNTNNTNNTNNTNNTNNTNNTNNTNNTNNTNNTNNTNNTNNTNNTNNTNNTNNTNNTNNTNNTNNTNNTNNTNNTNNTNNTNNTNNTNNTNNTNNTNNTNNTNNTNNTNNTNNTNNTNNTNNTNNTNNTNNTNNTNNTNNTNNTNNTNNTNNTNNTNNTNNTNNTNNTNNTNNTNNTNNTNNTNNTNNTNNTNNTNNTNNTNNTNNTNNTNNTNNTNNTNNTNNTNNTNNTNNTNNTNNTNNTNNTNNTNNTNNTNNTNNTNNTNNTNNTNNTNNTNNTNNTNNTNNTNNTNNTNNTNNTNNTNNTNNTNNTNNTNNTNNTNNTNNTNNTNNTNNTNNTNNTNNTNNTNNTNNTNNTNNTNNTNNTNNTNNTNNTNNTNNTNNTNNTNNTNNTNNT

SEQ ID NO: 71 - protein, 426 aa, Artificial Sequence
  Description of Artificial Sequence: Synthetic peptide
NNTNNTNNTNNTNNTNNTNNTNNTNNTNNTNNTNNTNNTNNTNNTNNTNNTNNTNNTNNTNNTNNTNNTNNTNNTNNTNNTNNTNNTNNTNNTNNTNNTNNTNNTNNTNNTNNTNNTNNTNNTNNTNNTNNTNNTNNTNNTNNTNNTNNTNNTNNTNNTNNTNNTNNTNNTNNTNNTNNTNNTNNTNNTNNTNNTNNTNNTNNTNNTNNTNNTNNTNNTNNTNNTNNTNNTNNTNNTNNTNNTNNTNNTNNTNNTNNTNNTNNTNNTNNTNNTNNTNNTNNTNNTNNTNNTNNTNNTNNTNNTNNTNNTNNTNNTNNTNNTNNTNNTNNTNNTNNTNNTNNTNNTNNTNNTNNTNNTNNTNNTNNTNNTNNTNNTNNTNNTNNTNNTNNTNNTNNTNNTNNTNNTNNTNNTNNTNNTNNTNNTNNT

SEQ ID NO: 72 - protein, 429 aa, Artificial Sequence
  Description of Artificial Sequence: Synthetic peptide
NNTNNTNNTNNTNNTNNTNNTNNTNNTNNTNNTNNTNNTNNTNNTNNTNNTNNTNNTNNTNNTNNTNNTNNTNNTNNTNNTNNTNNTNNTNNTNNTNNTNNTNNTNNTNNTNNTNNTNNTNNTNNTNNTNNTNNTNNTNNTNNTNNTNNTNNTNNTNNTNNTNNTNNTNNTNNTNNTNNTNNTNNTNNTNNTNNTNNTNNTNNTNNTNNTNNTNNTNNTNNTNNTNNTNNTNNTNNTNNTNNTNNTNNTNNTNNTNNTNNTNNTNNTNNTNNTNNTNNTNNTNNTNNTNNTNNTNNTNNTNNTNNTNNTNNTNNTNNTNNTNNTNNTNNTNNTNNTNNTNNTNNTNNTNNTNNTNNTNNTNNTNNTNNTNNTNNTNNTNNTNNTNNTNNTNNTNNTNNTNNTNNTNNTNNTNNTNNTNNTNNTNNTNNT

SEQ ID NO: 73 - protein, 432 aa, Artificial Sequence
  Description of Artificial Sequence: Synthetic peptide
NNTNNTNNTNNTNNTNNTNNTNNTNNTNNTNNTNNTNNTNNTNNTNNTNNTNNTNNTNNTNNTNNTNNTNNTNNTNNTNNTNNTNNTNNTNNTNNTNNTNNTNNTNNTNNTNNTNNTNNTNNTNNTNNTNNTNNTNNTNNTNNTNNTNNTNNTNNTNNTNNTNNTNNTNNTNNTNNTNNTNNTNNTNNTNNTNNTNNTNNTNNTNNTNNTNNTNNTNNTNNTNNTNNTNNTNNTNNTNNTNNTNNTNNTNNTNNTNNTNNTNNTNNTNNTNNTNNTNNTNNTNNTNNTNNTNNTNNTNNTNNTNNTNNTNNTNNTNNTNNTNNTNNTNNTNNTNNTNNTNNTNNTNNTNNTNNTNNTNNTNNTNNTNNTNNTNNTNNTNNTNNTNNTNNTNNTNNTNNTNNTNNTNNTNNTNNTNNTNNTNNTNNTNNTNNT

SEQ ID NO: 74 - protein, 435 aa, Artificial Sequence
  Description of Artificial Sequence: Synthetic peptide
NNTNNTNNTNNTNNTNNTNNTNNTNNTNNTNNTNNTNNTNNTNNTNNTNNTNNTNNTNNTNNTNNTNNTNNTNNTNNTNNTNNTNNTNNTNNTNNTNNTNNTNNTNNTNNTNNTNNTNNTNNTNNTNNTNNTNNTNNTNNTNNTNNTNNTNNTNNTNNTNNTNNTNNTNNTNNTNNTNNTNNTNNTNNTNNTNNTNNTNNTNNTNNTNNTNNTNNTNNTNNTNNTNNTNNTNNTNNTNNTNNTNNTNNTNNTNNTNNTNNTNNTNNTNNTNNTNNTNNTNNTNNTNNTNNTNNTNNTNNTNNTNNTNNTNNTNNTNNTNNTNNTNNTNNTNNTNNTNNTNNTNNTNNTNNTNNTNNTNNTNNTNNTNNTNNTNNTNNTNNTNNTNNTNNTNNTNNTNNTNNTNNTNNTNNTNNTNNTNNTNNTNNTNNTNNTNNT

SEQ ID NO: 75 - protein, 438 aa, Artificial Sequence
  Description of Artificial Sequence: Synthetic peptide
NNTNNTNNTNNTNNTNNTNNTNNTNNTNNTNNTNNTNNTNNTNNTNNTNNTNNTNNTNNTNNTNNTNNTNNTNNTNNTNNTNNTNNTNNTNNTNNTNNTNNTNNTNNTNNTNNTNNTNNTNNTNNTNNTNNTNNTNNTNNTNNTNNTNNTNNTNNTNNTNNTNNTNNTNNTNNTNNTNNTNNTNNTNNTNNTNNTNNTNNTNNTNNTNNTNNTNNTNNTNNTNNTNNTNNTNNTNNTNNTNNTNNTNNTNNTNNTNNTNNTNNTNNTNNTNNTNNTNNTNNTNNTNNTNNTNNTNNTNNTNNTNNTNNTNNTNNTNNTNNTNNTNNTNNTNNTNNTNNTNNTNNTNNTNNTNNTNNTNNTNNTNNTNNTNNTNNTNNTNNTNNTNNTNNTNNTNNTNNTNNTNNTNNTNNTNNTNNTNNTNNTNNTNNTNNTNNTNNT

SEQ ID NO: 76 - protein, 441 aa, Artificial Sequence
  Description of Artificial Sequence: Synthetic peptide
NNTNNTNNTNNTNNTNNTNNTNNTNNTNNTNNTNNTNNTNNTNNTNNTNNTNNTNNTNNTNNTNNTNNTNNTNNTNNTNNTNNTNNTNNTNNTNNTNNTNNTNNTNNTNNTNNTNNTNNTNNTNNTNNTNNTNNTNNTNNTNNTNNTNNTNNTNNTNNTNNTNNTNNTNNTNNTNNTNNTNNTNNTNNTNNTNNTNNTNNTNNTNNTNNTNNTNNTNNTNNTNNTNNTNNTNNTNNTNNTNNTNNTNNTNNTNNTNNTNNTNNTNNTNNTNNTNNTNNTNNTNNTNNTNNTNNTNNTNNTNNTNNTNNTNNTNNTNNTNNTNNTNNTNNTNNTNNTNNTNNTNNTNNTNNTNNTNNTNNTNNTNNTNNTNNTNNTNNTNNTNNTNNTNNTNNTNNTNNTNNTNNTNNTNNTNNTNNTNNTNNTNNTNNTNNTNNTNNTNNT

SEQ ID NO: 77 - protein, 444 aa, Artificial Sequence
  Description of Artificial Sequence: Synthetic peptide
NNTNNTNNTNNTNNTNNTNNTNNTNNTNNTNNTNNTNNTNNTNNTNNTNNTNNTNNTNNTNNTNNTNNTNNTNNTNNTNNTNNTNNTNNTNNTNNTNNTNNTNNTNNTNNTNNTNNTNNTNNTNNTNNTNNTNNTNNTNNTNNTNNTNNTNNTNNTNNTNNTNNTNNTNNTNNTNNTNNTNNTNNTNNTNNTNNTNNTNNTNNTNNTNNTNNTNNTNNTNNTNNTNNTNNTNNTNNTNNTNNTNNTNNTNNTNNTNNTNNTNNTNNTNNTNNTNNTNNTNNTNNTNNTNNTNNTNNTNNTNNTNNTNNTNNTNNTNNTNNTNNTNNTNNTNNTNNTNNTNNTNNTNNTNNTNNTNNTNNTNNTNNTNNTNNTNNTNNTNNTNNTNNTNNTNNTNNTNNTNNTNNTNNTNNTNNTNNTNNTNNTNNTNNTNNTNNTNNTNNTNNT

SEQ ID NO: 78 - protein, 447 aa, Artificial Sequence
  Description of Artificial Sequence: Synthetic peptide
NNTNNTNNTNNTNNTNNTNNTNNTNNTNNTNNTNNTNNTNNTNNTNNTNNTNNTNNTNNTNNTNNTNNTNNTNNTNNTNNTNNTNNTNNTNNTNNTNNTNNTNNTNNTNNTNNTNNTNNTNNTNNTNNTNNTNNTNNTNNTNNTNNTNNTNNTNNTNNTNNTNNTNNTNNTNNTNNTNNTNNTNNTNNTNNTNNTNNTNNTNNTNNTNNTNNTNNTNNTNNTNNTNNTNNTNNTNNTNNTNNTNNTNNTNNTNNTNNTNNTNNTNNTNNTNNTNNTNNTNNTNNTNNTNNTNNTNNTNNTNNTNNTNNTNNTNNTNNTNNTNNTNNTNNTNNTNNTNNTNNTNNTNNTNNTNNTNNTNNTNNTNNTNNTNNTNNTNNTNNTNNTNNTNNTNNTNNTNNTNNTNNTNNTNNTNNTNNTNNTNNTNNTNNTNNTNNTNNTNNTNNTNNT

SEQ ID NO: 79 - protein, 450 aa, Artificial Sequence
  Description of Artificial Sequence: Synthetic peptide
NNTNNTNNTNNTNNTNNTNNTNNTNNTNNTNNTNNTNNTNNTNNTNNTNNTNNTNNTNNTNNTNNTNNTNNTNNTNNTNNTNNTNNTNNTNNTNNTNNTNNTNNTNNTNNTNNTNNTNNTNNTNNTNNTNNTNNTNNTNNTNNTNNTNNTNNTNNTNNTNNTNNTNNTNNTNNTNNTNNTNNTNNTNNTNNTNNTNNTNNTNNTNNTNNTNNTNNTNNTNNTNNTNNTNNTNNTNNTNNTNNTNNTNNTNNTNNTNNTNNTNNTNNTNNTNNTNNTNNTNNTNNTNNTNNTNNTNNTNNTNNTNNTNNTNNTNNTNNTNNTNNTNNTNNTNNTNNTNNTNNTNNTNNTNNTNNTNNTNNTNNTNNTNNTNNTNNTNNTNNTNNTNNTNNTNNTNNTNNTNNTNNTNNTNNTNNTNNTNNTNNTNNTNNTNNTNNTNNTNNTNNTNNTNNT

SEQ ID NO: 80 - protein, 453 aa, Artificial Sequence
  Description of Artificial Sequence: Synthetic peptide
NNTNNTNNTNNTNNTNNTNNTNNTNNTNNTNNTNNTNNTNNTNNTNNTNNTNNTNNTNNTNNTNNTNNTNNTNNTNNTNNTNNTNNTNNTNNTNNTNNTNNTNNTNNTNNTNNTNNTNNTNNTNNTNNTNNTNNTNNTNNTNNTNNTNNTNNTNNTNNTNNTNNTNNTNNTNNTNNTNNTNNTNNTNNTNNTNNTNNTNNTNNTNNTNNTNNTNNTNNTNNTNNTNNTNNTNNTNNTNNTNNTNNTNNTNNTNNTNNTNNTNNTNNTNNTNNTNNTNNTNNTNNTNNTNNTNNTNNTNNTNNTNNTNNTNNTNNTNNTNNTNNTNNTNNTNNTNNTNNTNNTNNTNNTNNTNNTNNTNNTNNTNNTNNTNNTNNTNNTNNTNNTNNTNNTNNTNNTNNTNNTNNTNNTNNTNNTNNTNNTNNTNNTNNTNNTNNTNNTNNTNNTNNTNNTNNT

SEQ ID NO: 81 - protein, 456 aa, Artificial Sequence
  Description of Artificial Sequence: Synthetic peptide
NNTNNTNNTNNTNNTNNTNNTNNTNNTNNTNNTNNTNNTNNTNNTNNTNNTNNTNNTNNTNNTNNTNNTNNTNNTNNTNNTNNTNNTNNTNNTNNTNNTNNTNNTNNTNNTNNTNNTNNTNNTNNTNNTNNTNNTNNTNNTNNTNNTNNTNNTNNTNNTNNTNNTNNTNNTNNTNNTNNTNNTNNTNNTNNTNNTNNTNNTNNTNNTNNTNNTNNTNNTNNTNNTNNTNNTNNTNNTNNTNNTNNTNNTNNTNNTNNTNNTNNTNNTNNTNNTNNTNNTNNTNNTNNTNNTNNTNNTNNTNNTNNTNNTNNTNNTNNTNNTNNTNNTNNTNNTNNTNNTNNTNNTNNTNNTNNTNNTNNTNNTNNTNNTNNTNNTNNTNNTNNTNNTNNTNNTNNTNNTNNTNNTNNTNNTNNTNNTNNTNNTNNTNNTNNTNNTNNTNNTNNTNNTNNTNNTNNT

SEQ ID NO: 82 - protein, 459 aa, Artificial Sequence
  Description of Artificial Sequence: Synthetic peptide
NNTNNTNNTNNTNNTNNTNNTNNTNNTNNTNNTNNTNNTNNTNNTNNTNNTNNTNNTNNTNNTNNTNNTNNTNNTNNTNNTNNTNNTNNTNNTNNTNNTNNTNNTNNTNNTNNTNNTNNTNNTNNTNNTNNTNNTNNTNNTNNTNNTNNTNNTNNTNNTNNTNNTNNTNNTNNTNNTNNTNNTNNTNNTNNTNNTNNTNNTNNTNNTNNTNNTNNTNNTNNTNNTNNTNNTNNTNNTNNTNNTNNTNNTNNTNNTNNTNNTNNTNNTNNTNNTNNTNNTNNTNNTNNTNNTNNTNNTNNTNNTNNTNNTNNTNNTNNTNNTNNTNNTNNTNNTNNTNNTNNTNNTNNTNNTNNTNNTNNTNNTNNTNNTNNTNNTNNTNNTNNTNNTNNTNNTNNTNNTNNTNNTNNTNNTNNTNNTNNTNNTNNTNNTNNTNNTNNTNNTNNTNNTNNTNNTNNTNNT

SEQ ID NO: 83 - protein, 462 aa, Artificial Sequence
  Description of Artificial Sequence: Synthetic peptide
NNTNNTNNTNNTNNTNNTNNTNNTNNTNNTNNTNNTNNTNNTNNTNNTNNTNNTNNTNNTNNTNNTNNTNNTNNTNNTNNTNNTNNTNNTNNTNNTNNTNNTNNTNNTNNTNNTNNTNNTNNTNNTNNTNNTNNTNNTNNTNNTNNTNNTNNTNNTNNTNNTNNTNNTNNTNNTNNTNNTNNTNNTNNTNNTNNTNNTNNTNNTNNTNNTNNTNNTNNTNNTNNTNNTNNTNNTNNTNNTNNTNNTNNTNNTNNTNNTNNTNNTNNTNNTNNTNNTNNTNNTNNTNNTNNTNNTNNTNNTNNTNNTNNTNNTNNTNNTNNTNNTNNTNNTNNTNNTNNTNNTNNTNNTNNTNNTNNTNNTNNTNNTNNTNNTNNTNNTNNTNNTNNTNNTNNTNNTNNTNNTNNTNNTNNTNNTNNTNNTNNTNNTNNTNNTNNTNNTNNTNNTNNTNNTNNTNNTNNTNNT

SEQ ID NO: 84 - protein, 468 aa, Artificial Sequence
  Description of Artificial Sequence: Synthetic peptide
NNTNNTNNTNNTNNTNNTNNTNNTNNTNNTNNTNNTNNTNNTNNTNNTNNTNNTNNTNNTNNTNNTNNTNNTNNTNNTNNTNNTNNTNNTNNTNNTNNTNNTNNTNNTNNTNNTNNTNNTNNTNNTNNTNNTNNTNNTNNTNNTNNTNNTNNTNNTNNTNNTNNTNNTNNTNNTNNTNNTNNTNNTNNTNNTNNTNNTNNTNNTNNTNNTNNTNNTNNTNNTNNTNNTNNTNNTNNTNNTNNTNNTNNTNNTNNTNNTNNTNNTNNTNNTNNTNNTNNTNNTNNTNNTNNTNNTNNTNNTNNTNNTNNTNNTNNTNNTNNTNNTNNTNNTNNTNNTNNTNNTNNTNNTNNTNNTNNTNNTNNTNNTNNTNNTNNTNNTNNTNNTNNTNNTNNTNNTNNTNNTNNTNNTNNTNNTNNTNNTNNTNNTNNTNNTNNTNNTNNTNNTNNTNNTNNTNNTNNTNNTNNTNNT

SEQ ID NO: 85 - protein, 471 aa, Artificial Sequence
  Description of Artificial Sequence: Synthetic peptide
NNTNNTNNTNNTNNTNNTNNTNNTNNTNNTNNTNNTNNTNNTNNTNNTNNTNNTNNTNNTNNTNNTNNTNNTNNTNNTNNTNNTNNTNNTNNTNNTNNTNNTNNTNNTNNTNNTNNTNNTNNTNNTNNTNNTNNTNNTNNTNNTNNTNNTNNTNNTNNTNNTNNTNNTNNTNNTNNTNNTNNTNNTNNTNNTNNTNNTNNTNNTNNTNNTNNTNNTNNTNNTNNTNNTNNTNNTNNTNNTNNTNNTNNTNNTNNTNNTNNTNNTNNTNNTNNTNNTNNTNNTNNTNNTNNTNNTNNTNNTNNTNNTNNTNNTNNTNNTNNTNNTNNTNNTNNTNNTNNTNNTNNTNNTNNTNNTNNTNNTNNTNNTNNTNNTNNTNNTNNTNNTNNTNNTNNTNNTNNTNNTNNTNNTNNTNNTNNTNNTNNTNNTNNTNNTNNTNNTNNTNNTNNTNNTNNTNNTNNTNNTNNTNNTNNT

SEQ ID NO: 86 - protein, 474 aa, Artificial Sequence
  Description of Artificial Sequence: Synthetic peptide
NNTNNTNNTNNTNNTNNTNNTNNTNNTNNTNNTNNTNNTNNTNNTNNTNNTNNTNNTNNTNNTNNTNNTNNTNNTNNTNNTNNTNNTNNTNNTNNTNNTNNTNNTNNTNNTNNTNNTNNTNNTNNTNNTNNTNNTNNTNNTNNTNNTNNTNNTNNTNNTNNTNNTNNTNNTNNTNNTNNTNNTNNTNNTNNTNNTNNTNNTNNTNNTNNTNNTNNTNNTNNTNNTNNTNNTNNTNNTNNTNNTNNTNNTNNTNNTNNTNNTNNTNNTNNTNNTNNTNNTNNTNNTNNTNNTNNTNNTNNTNNTNNTNNTNNTNNTNNTNNTNNTNNTNNTNNTNNTNNTNNTNNTNNTNNTNNTNNTNNTNNTNNTNNTNNTNNTNNTNNTNNTNNTNNTNNTNNTNNTNNTNNTNNTNNTNNTNNTNNTNNTNNTNNTNNTNNTNNTNNTNNTNNTNNTNNTNNTNNTNNTNNTNNTNNTNNT

SEQ ID NO: 87 - protein, 477 aa, Artificial Sequence
  Description of Artificial Sequence: Synthetic peptide
NNTNNTNNTNNTNNTNNTNNTNNTNNTNNTNNTNNTNNTNNTNNTNNTNNTNNTNNTNNTNNTNNTNNTNNTNNTNNTNNTNNTNNTNNTNNTNNTNNTNNTNNTNNTNNTNNTNNTNNTNNTNNTNNTNNTNNTNNTNNTNNTNNTNNTNNTNNTNNTNNTNNTNNTNNTNNTNNTNNTNNTNNTNNTNNTNNTNNTNNTNNTNNTNNTNNTNNTNNTNNTNNTNNTNNTNNTNNTNNTNNTNNTNNTNNTNNTNNTNNTNNTNNTNNTNNTNNTNNTNNTNNTNNTNNTNNTNNTNNTNNTNNTNNTNNTNNTNNTNNTNNTNNTNNTNNTNNTNNTNNTNNTNNTNNTNNTNNTNNTNNTNNTNNTNNTNNTNNTNNTNNTNNTNNTNNTNNTNNTNNTNNTNNTNNTNNTNNTNNTNNTNNTNNTNNTNNTNNTNNTNNTNNTNNTNNTNNTNNTNNTNNTNNTNNTNNTNNT

SEQ ID NO: 88 - protein, 480 aa, Artificial Sequence
  Description of Artificial Sequence: Synthetic peptide
NNTNNTNNTNNTNNTNNTNNTNNTNNTNNTNNTNNTNNTNNTNNTNNTNNTNNTNNTNNTNNTNNTNNTNNTNNTNNTNNTNNTNNTNNTNNTNNTNNTNNTNNTNNTNNTNNTNNTNNTNNTNNTNNTNNTNNTNNTNNTNNTNNTNNTNNTNNTNNTNNTNNTNNTNNTNNTNNTNNTNNTNNTNNTNNTNNTNNTNNTNNTNNTNNTNNTNNTNNTNNTNNTNNTNNTNNTNNTNNTNNTNNTNNTNNTNNTNNTNNTNNTNNTNNTNNTNNTNNTNNTNNTNNTNNTNNTNNTNNTNNTNNTNNTNNTNNTNNTNNTNNTNNTNNTNNTNNTNNTNNTNNTNNTNNTNNTNNTNNTNNTNNTNNTNNTNNTNNTNNTNNTNNTNNTNNTNNTNNTNNTNNTNNTNNTNNTNNTNNTNNTNNTNNTNNTNNTNNTNNTNNTNNTNNTNNTNNTNNTNNTNNTNNTNNTNNTNNTNNT

SEQ ID NO: 89 - protein, 483 aa, Artificial Sequence
  Description of Artificial Sequence: Synthetic peptide
NNTNNTNNTNNTNNTNNTNNTNNTNNTNNTNNTNNTNNTNNTNNTNNTNNTNNTNNTNNTNNTNNTNNTNNTNNTNNTNNTNNTNNTNNTNNTNNTNNTNNTNNTNNTNNTNNTNNTNNTNNTNNTNNTNNTNNTNNTNNTNNTNNTNNTNNTNNTNNTNNTNNTNNTNNTNNTNNTNNTNNTNNTNNTNNTNNTNNTNNTNNTNNTNNTNNTNNTNNTNNTNNTNNTNNTNNTNNTNNTNNTNNTNNTNNTNNTNNTNNTNNTNNTNNTNNTNNTNNTNNTNNTNNTNNTNNTNNTNNTNNTNNTNNTNNTNNTNNTNNTNNTNNTNNTNNTNNTNNTNNTNNTNNTNNTNNTNNTNNTNNTNNTNNTNNTNNTNNTNNTNNTNNTNNTNNTNNTNNTNNTNNTNNTNNTNNTNNTNNTNNTNNTNNTNNTNNTNNTNNTNNTNNTNNTNNTNNTNNTNNTNNTNNTNNTNNTNNTNNTNNT

SEQ ID NO: 90 - protein, 486 aa, Artificial Sequence
  Description of Artificial Sequence: Synthetic peptide
NNTNNTNNTNNTNNTNNTNNTNNTNNTNNTNNTNNTNNTNNTNNTNNTNNTNNTNNTNNTNNTNNTNNTNNTNNTNNTNNTNNTNNTNNTNNTNNTNNTNNTNNTNNTNNTNNTNNTNNTNNTNNTNNTNNTNNTNNTNNTNNTNNTNNTNNTNNTNNTNNTNNTNNTNNTNNTNNTNNTNNTNNTNNTNNTNNTNNTNNTNNTNNTNNTNNTNNTNNTNNTNNTNNTNNTNNTNNTNNTNNTNNTNNTNNTNNTNNTNNTNNTNNTNNTNNTNNTNNTNNTNNTNNTNNTNNTNNTNNTNNTNNTNNTNNTNNTNNTNNTNNTNNTNNTNNTNNTNNTNNTNNTNNTNNTNNTNNTNNTNNTNNTNNTNNTNNTNNTNNTNNTNNTNNTNNTNNTNNTNNTNNTNNTNNTNNTNNTNNTNNTNNTNNTNNTNNTNNTNNTNNTNNTNNTNNTNNTNNTNNTNNTNNTNNTNNTNNTNNTNNTNNT

SEQ ID NO: 91 - protein, 489 aa, Artificial Sequence
  Description of Artificial Sequence: Synthetic peptide
NNTNNTNNTNNTNNTNNTNNTNNTNNTNNTNNTNNTNNTNNTNNTNNTNNTNNTNNTNNTNNTNNTNNTNNTNNTNNTNNTNNTNNTNNTNNTNNTNNTNNTNNTNNTNNTNNTNNTNNTNNTNNTNNTNNTNNTNNTNNTNNTNNTNNTNNTNNTNNTNNTNNTNNTNNTNNTNNTNNTNNTNNTNNTNNTNNTNNTNNTNNTNNTNNTNNTNNTNNTNNTNNTNNTNNTNNTNNTNNTNNTNNTNNTNNTNNTNNTNNTNNTNNTNNTNNTNNTNNTNNTNNTNNTNNTNNTNNTNNTNNTNNTNNTNNTNNTNNTNNTNNTNNTNNTNNTNNTNNTNNTNNTNNTNNTNNTNNTNNTNNTNNTNNTNNTNNTNNTNNTNNTNNTNNTNNTNNTNNTNNTNNTNNTNNTNNTNNTNNTNNTNNTNNTNNTNNTNNTNNTNNTNNTNNTNNTNNTNNTNNTNNTNNTNNTNNTNNTNNTNNTNNTNNT

SEQ ID NO: 92 - protein, 492 aa, Artificial Sequence
  Description of Artificial Sequence: Synthetic peptide
NNTNNTNNTNNTNNTNNTNNTNNTNNTNNTNNTNNTNNTNNTNNTNNTNNTNNTNNTNNTNNTNNTNNTNNTNNTNNTNNTNNTNNTNNTNNTNNTNNTNNTNNTNNTNNTNNTNNTNNTNNTNNTNNTNNTNNTNNTNNTNNTNNTNNTNNTNNTNNTNNTNNTNNTNNTNNTNNTNNTNNTNNTNNTNNTNNTNNTNNTNNTNNTNNTNNTNNTNNTNNTNNTNNTNNTNNTNNTNNTNNTNNTNNTNNTNNTNNTNNTNNTNNTNNTNNTNNTNNTNNTNNTNNTNNTNNTNNTNNTNNTNNTNNTNNTNNTNNTNNTNNTNNTNNTNNTNNTNNTNNTNNTNNTNNTNNTNNTNNTNNTNNTNNTNNTNNTNNTNNTNNTNNTNNTNNTNNTNNTNNTNNTNNTNNTNNTNNTNNTNNTNNTNNTNNTNNTNNTNNTNNTNNTNNTNNTNNTNNTNNTNNTNNTNNTNNTNNTNNTNNTNNTNNTNNT

SEQ ID NO: 93 - protein, 495 aa, Artificial Sequence
  Description of Artificial Sequence: Synthetic peptide
NNTNNTNNTNNTNNTNNTNNTNNTNNTNNTNNTNNTNNTNNTNNTNNTNNTNNTNNTNNTNNTNNTNNTNNTNNTNNTNNTNNTNNTNNTNNTNNTNNTNNTNNTNNTNNTNNTNNTNNTNNTNNTNNTNNTNNTNNTNNTNNTNNTNNTNNTNNTNNTNNTNNTNNTNNTNNTNNTNNTNNTNNTNNTNNTNNTNNTNNTNNTNNTNNTNNTNNTNNTNNTNNTNNTNNTNNTNNTNNTNNTNNTNNTNNTNNTNNTNNTNNTNNTNNTNNTNNTNNTNNTNNTNNTNNTNNTNNTNNTNNTNNTNNTNNTNNTNNTNNTNNTNNTNNTNNTNNTNNTNNTNNTNNTNNTNNTNNTNNTNNTNNTNNTNNTNNTNNTNNTNNTNNTNNTNNTNNTNNTNNTNNTNNTNNTNNTNNTNNTNNTNNTNNTNNTNNTNNTNNTNNTNNTNNTNNTNNTNNTNNTNNTNNTNNTNNTNNTNNTNNTNNTNNTNNTNNT

SEQ ID NO: 94 - protein, 498 aa, Artificial Sequence
  Description of Artificial Sequence: Synthetic peptide
NNTNNTNNTNNTNNTNNTNNTNNTNNTNNTNNTNNTNNTNNTNNTNNTNNTNNTNNTNNTNNTNNTNNTNNTNNTNNTNNTNNTNNTNNTNNTNNTNNTNNTNNTNNTNNTNNTNNTNNTNNTNNTNNTNNTNNTNNTNNTNNTNNTNNTNNTNNTNNTNNTNNTNNTNNTNNTNNTNNTNNTNNTNNTNNTNNTNNTNNTNNTNNTNNTNNTNNTNNTNNTNNTNNTNNTNNTNNTNNTNNTNNTNNTNNTNNTNNTNNTNNTNNTNNTNNTNNTNNTNNTNNTNNTNNTNNTNNTNNTNNTNNTNNTNNTNNTNNTNNTNNTNNTNNTNNTNNTNNTNNTNNTNNTNNTNNTNNTNNTNNTNNTNNTNNTNNTNNTNNTNNTNNTNNTNNTNNTNNTNNTNNTNNTNNTNNTNNTNNTNNTNNTNNTNNTNNTNNTNNTNNTNNTNNTNNTNNTNNTNNTNNTNNTNNTNNTNNTNNTNNTNNTNNTNNTNNTNNT

SEQ ID NO: 95 - protein, 501 aa, Artificial Sequence
  Description of Artificial Sequence: Synthetic peptide
NNTNNTNNTNNTNNTNNTNNTNNTNNTNNTNNTNNTNNTNNTNNTNNTNNTNNTNNTNNTNNTNNTNNTNNTNNTNNTNNTNNTNNTNNTNNTNNTNNTNNTNNTNNTNNTNNTNNTNNTNNTNNTNNTNNTNNTNNTNNTNNTNNTNNTNNTNNTNNTNNTNNTNNTNNTNNTNNTNNTNNTNNTNNTNNTNNTNNTNNTNNTNNTNNTNNTNNTNNTNNTNNTNNTNNTNNTNNTNNTNNTNNTNNTNNTNNTNNTNNTNNTNNTNNTNNTNNTNNTNNTNNTNNTNNTNNTNNTNNTNNTNNTNNTNNTNNTNNTNNTNNTNNTNNTNNTNNTNNTNNTNNTNNTNNTNNTNNTNNTNNTNNTNNTNNTNNTNNTNNTNNTNNTNNTNNTNNTNNTNNTNNTNNTNNTNNTNNTNNTNNTNNTNNTNNTNNTNNTNNTNNTNNTNNTNNTNNTNNTNNTNNTNNTNNTNNTNNTNNTNNTNNTNNTNNTNNTNNTNNT

SEQ ID NO: 96 - protein, 504 aa, Artificial Sequence
  Description of Artificial Sequence: Synthetic peptide
NNTNNTNNTNNTNNTNNTNNTNNTNNTNNTNNTNNTNNTNNTNNTNNTNNTNNTNNTNNTNNTNNTNNTNNTNNTNNTNNTNNTNNTNNTNNTNNTNNTNNTNNTNNTNNTNNTNNTNNTNNTNNTNNTNNTNNTNNTNNTNNTNNTNNTNNTNNTNNTNNTNNTNNTNNTNNTNNTNNTNNTNNTNNTNNTNNTNNTNNTNNTNNTNNTNNTNNTNNTNNTNNTNNTNNTNNTNNTNNTNNTNNTNNTNNTNNTNNTNNTNNTNNTNNTNNTNNTNNTNNTNNTNNTNNTNNTNNTNNTNNTNNTNNTNNTNNTNNTNNTNNTNNTNNTNNTNNTNNTNNTNNTNNTNNTNNTNNTNNTNNTNNTNNTNNTNNTNNTNNTNNTNNTNNTNNTNNTNNTNNTNNTNNTNNTNNTNNTNNTNNTNNTNNTNNTNNTNNTNNTNNTNNTNNTNNTNNTNNTNNTNNTNNTNNTNNTNNTNNTNNTNNTNNTNNTNNTNNTNNTNNT

SEQ ID NO: 97 - protein, 507 aa, Artificial Sequence
  Description of Artificial Sequence: Synthetic peptide
NNTNNTNNTNNTNNTNNTNNTNNTNNTNNTNNTNNTNNTNNTNNTNNTNNTNNTNNTNNTNNTNNTNNTNNTNNTNNTNNTNNTNNTNNTNNTNNTNNTNNTNNTNNTNNTNNTNNTNNTNNTNNTNNTNNTNNTNNTNNTNNTNNTNNTNNTNNTNNTNNTNNTNNTNNTNNTNNTNNTNNTNNTNNTNNTNNTNNTNNTNNTNNTNNTNNTNNTNNTNNTNNTNNTNNTNNTNNTNNTNNTNNTNNTNNTNNTNNTNNTNNTNNTNNTNNTNNTNNTNNTNNTNNTNNTNNTNNTNNTNNTNNTNNTNNTNNTNNTNNTNNTNNTNNTNNTNNTNNTNNTNNTNNTNNTNNTNNTNNTNNTNNTNNTNNTNNTNNTNNTNNTNNTNNTNNTNNTNNTNNTNNTNNTNNTNNTNNTNNTNNTNNTNNTNNTNNTNNTNNTNNTNNTNNTNNTNNTNNTNNTNNTNNTNNTNNTNNTNNTNNTNNTNNTNNTNNTNNTNNTNNTNNT

SEQ ID NO: 98 - protein, 510 aa, Artificial Sequence
  Description of Artificial Sequence: Synthetic peptide
NNTNNTNNTNNTNNTNNTNNTNNTNNTNNTNNTNNTNNTNNTNNTNNTNNTNNTNNTNNTNNTNNTNNTNNTNNTNNTNNTNNTNNTNNTNNTNNTNNTNNTNNTNNTNNTNNTNNTNNTNNTNNTNNTNNTNNTNNTNNTNNTNNTNNTNNTNNTNNTNNTNNTNNTNNTNNTNNTNNTNNTNNTNNTNNTNNTNNTNNTNNTNNTNNTNNTNNTNNTNNTNNTNNTNNTNNTNNTNNTNNTNNTNNTNNTNNTNNTNNTNNTNNTNNTNNTNNTNNTNNTNNTNNTNNTNNTNNTNNTNNTNNTNNTNNTNNTNNTNNTNNTNNTNNTNNTNNTNNTNNTNNTNNTNNTNNTNNTNNTNNTNNTNNTNNTNNTNNTNNTNNTNNTNNTNNTNNTNNTNNTNNTNNTNNTNNTNNTNNTNNTNNTNNTNNTNNTNNTNNTNNTNNTNNTNNTNNTNNTNNTNNTNNTNNTNNTNNTNNTNNTNNTNNTNNTNNTNNTNNTNNTNNTNNT

SEQ ID NO: 99 - protein, 513 aa, Artificial Sequence
  Description of Artificial Sequence: Synthetic peptide
NNTNNTNNTNNTNNTNNTNNTNNTNNTNNTNNTNNTNNTNNTNNTNNTNNTNNTNNTNNTNNTNNTNNTNNTNNTNNTNNTNNTNNTNNTNNTNNTNNTNNTNNTNNTNNTNNTNNTNNTNNTNNTNNTNNTNNTNNTNNTNNTNNTNNTNNTNNTNNTNNTNNTNNTNNTNNTNNTNNTNNTNNTNNTNNTNNTNNTNNTNNTNNTNNTNNTNNTNNTNNTNNTNNTNNTNNTNNTNNTNNTNNTNNTNNTNNTNNTNNTNNTNNTNNTNNTNNTNNTNNTNNTNNTNNTNNTNNTNNTNNTNNTNNTNNTNNTNNTNNTNNTNNTNNTNNTNNTNNTNNTNNTNNTNNTNNTNNTNNTNNTNNTNNTNNTNNTNNTNNTNNTNNTNNTNNTNNTNNTNNTNNTNNTNNTNNTNNTNNTNNTNNTNNTNNTNNTNNTNNTNNTNNTNNTNNTNNTNNTNNTNNTNNTNNTNNTNNTNNTNNTNNTNNTNNTNNTNNTNNTNNTNNTNNTNNT

SEQ ID NO: 100 - protein, 516 aa, Artificial Sequence
  Description of Artificial Sequence: Synthetic peptide
NNTNNTNNTNNTNNTNNTNNTNNTNNTNNTNNTNNTNNTNNTNNTNNTNNTNNTNNTNNTNNTNNTNNTNNTNNTNNTNNTNNTNNTNNTNNTNNTNNTNNTNNTNNTNNTNNTNNTNNTNNTNNTNNTNNTNNTNNTNNTNNTNNTNNTNNTNNTNNTNNTNNTNNTNNTNNTNNTNNTNNTNNTNNTNNTNNTNNTNNTNNTNNTNNTNNTNNTNNTNNTNNTNNTNNTNNTNNTNNTNNTNNTNNTNNTNNTNNTNNTNNTNNTNNTNNTNNTNNTNNTNNTNNTNNTNNTNNTNNTNNTNNTNNTNNTNNTNNTNNTNNTNNTNNTNNTNNTNNTNNTNNTNNTNNTNNTNNTNNTNNTNNTNNTNNTNNTNNTNNTNNTNNTNNTNNTNNTNNTNNTNNTNNTNNTNNTNNTNNTNNTNNTNNTNNTNNTNNTNNTNNTNNTNNTNNTNNTNNTNNTNNTNNTNNTNNTNNTNNTNNTNNTNNTNNTNNTNNTNNTNNTNNTNNTNNTNNT

SEQ ID NO: 101 - protein, 519 aa, Artificial Sequence
  Description of Artificial Sequence: Synthetic peptide
NNTNNTNNTNNTNNTNNTNNTNNTNNTNNTNNTNNTNNTNNTNNTNNTNNTNNTNNTNNTNNTNNTNNTNNTNNTNNTNNTNNTNNTNNTNNTNNTNNTNNTNNTNNTNNTNNTNNTNNTNNTNNTNNTNNTNNTNNTNNTNNTNNTNNTNNTNNTNNTNNTNNTNNTNNTNNTNNTNNTNNTNNTNNTNNTNNTNNTNNTNNTNNTNNTNNTNNTNNTNNTNNTNNTNNTNNTNNTNNTNNTNNTNNTNNTNNTNNTNNTNNTNNTNNTNNTNNTNNTNNTNNTNNTNNTNNTNNTNNTNNTNNTNNTNNTNNTNNTNNTNNTNNTNNTNNTNNTNNTNNTNNTNNTNNTNNTNNTNNTNNTNNTNNTNNTNNTNNTNNTNNTNNTNNTNNTNNTNNTNNTNNTNNTNNTNNTNNTNNTNNTNNTNNTNNTNNTNNTNNTNNTNNTNNTNNTNNTNNTNNTNNTNNTNNTNNTNNTNNTNNTNNTNNTNNTNNTNNTNNTNNTNNTNNTNNTNNTNNT

SEQ ID NO: 102 - protein, 522 aa, Artificial Sequence
  Description of Artificial Sequence: Synthetic peptide
NNTNNTNNTNNTNNTNNTNNTNNTNNTNNTNNTNNTNNTNNTNNTNNTNNTNNTNNTNNTNNTNNTNNTNNTNNTNNTNNTNNTNNTNNTNNTNNTNNTNNTNNTNNTNNTNNTNNTNNTNNTNNTNNTNNTNNTNNTNNTNNTNNTNNTNNTNNTNNTNNTNNTNNTNNTNNTNNTNNTNNTNNTNNTNNTNNTNNTNNTNNTNNTNNTNNTNNTNNTNNTNNTNNTNNTNNTNNTNNTNNTNNTNNTNNTNNTNNTNNTNNTNNTNNTNNTNNTNNTNNTNNTNNTNNTNNTNNTNNTNNTNNTNNTNNTNNTNNTNNTNNTNNTNNTNNTNNTNNTNNTNNTNNTNNTNNTNNTNNTNNTNNTNNTNNTNNTNNTNNTNNTNNTNNTNNTNNTNNTNNTNNTNNTNNTNNTNNTNNTNNTNNTNNTNNTNNTNNTNNTNNTNNTNNTNNTNNTNNTNNTNNTNNTNNTNNTNNTNNTNNTNNTNNTNNTNNTNNTNNTNNTNNTNNTNNTNNTNNTNNT

SEQ ID NO: 103 - protein, 525 aa, Artificial Sequence
  Description of Artificial Sequence: Synthetic peptide
NNTNNTNNTNNTNNTNNTNNTNNTNNTNNTNNTNNTNNTNNTNNTNNTNNTNNTNNTNNTNNTNNTNNTNNTNNTNNTNNTNNTNNTNNTNNTNNTNNTNNTNNTNNTNNTNNTNNTNNTNNTNNTNNTNNTNNTNNTNNTNNTNNTNNTNNTNNTNNTNNTNNTNNTNNTNNTNNTNNTNNTNNTNNTNNTNNTNNTNNTNNTNNTNNTNNTNNTNNTNNTNNTNNTNNTNNTNNTNNTNNTNNTNNTNNTNNTNNTNNTNNTNNTNNTNNTNNTNNTNNTNNTNNTNNTNNTNNTNNTNNTNNTNNTNNTNNTNNTNNTNNTNNTNNTNNTNNTNNTNNTNNTNNTNNTNNTNNTNNTNNTNNTNNTNNTNNTNNTNNTNNTNNTNNTNNTNNTNNTNNTNNTNNTNNTNNTNNTNNTNNTNNTNNTNNTNNTNNTNNTNNTNNTNNTNNTNNTNNTNNTNNTNNTNNTNNTNNTNNTNNTNNTNNTNNTNNTNNTNNTNNTNNTNNTNNTNNTNNTNNTNNT

SEQ ID NO: 104 - protein, 528 aa, Artificial Sequence
  Description of Artificial Sequence: Synthetic peptide
NNTNNTNNTNNTNNTNNTNNTNNTNNTNNTNNTNNTNNTNNTNNTNNTNNTNNTNNTNNTNNTNNTNNTNNTNNTNNTNNTNNTNNTNNTNNTNNTNNTNNTNNTNNTNNTNNTNNTNNTNNTNNTNNTNNTNNTNNTNNTNNTNNTNNTNNTNNTNNTNNTNNTNNTNNTNNTNNTNNTNNTNNTNNTNNTNNTNNTNNTNNTNNTNNTNNTNNTNNTNNTNNTNNTNNTNNTNNTNNTNNTNNTNNTNNTNNTNNTNNTNNTNNTNNTNNTNNTNNTNNTNNTNNTNNTNNTNNTNNTNNTNNTNNTNNTNNTNNTNNTNNTNNTNNTNNTNNTNNTNNTNNTNNTNNTNNTNNTNNTNNTNNTNNTNNTNNTNNTNNTNNTNNTNNTNNTNNTNNTNNTNNTNNTNNTNNTNNTNNTNNTNNTNNTNNTNNTNNTNNTNNTNNTNNTNNTNNTNNTNNTNNTNNTNNTNNTNNTNNTNNTNNTNNTNNTNNTNNTNNTNNTNNTNNTNNTNNTNNTNNTNNTNNT

SEQ ID NO: 105 - protein, 531 aa, Artificial Sequence
  Description of Artificial Sequence: Synthetic peptide
NNTNNTNNTNNTNNTNNTNNTNNTNNTNNTNNTNNTNNTNNTNNTNNTNNTNNTNNTNNTNNTNNTNNTNNTNNTNNTNNTNNTNNTNNTNNTNNTNNTNNTNNTNNTNNTNNTNNTNNTNNTNNTNNTNNTNNTNNTNNTNNTNNTNNTNNTNNTNNTNNTNNTNNTNNTNNTNNTNNTNNTNNTNNTNNTNNTNNTNNTNNTNNTNNTNNTNNTNNTNNTNNTNNTNNTNNTNNTNNTNNTNNTNNTNNTNNTNNTNNTNNTNNTNNTNNTNNTNNTNNTNNTNNTNNTNNTNNTNNTNNTNNTNNTNNTNNTNNTNNTNNTNNTNNTNNTNNTNNTNNTNNTNNTNNTNNTNNTNNTNNTNNTNNTNNTNNTNNTNNTNNTNNTNNTNNTNNTNNTNNTNNTNNTNNTNNTNNTNNTNNTNNTNNTNNTNNTNNTNNTNNTNNTNNTNNTNNTNNTNNTNNTNNTNNTNNTNNTNNTNNTNNTNNTNNTNNTNNTNNTNNTNNTNNTNNTNNTNNTNNTNNTNNTNNT

SEQ ID NO: 106 - protein, 534 aa, Artificial Sequence
  Description of Artificial Sequence: Synthetic peptide
NNTNNTNNTNNTNNTNNTNNTNNTNNTNNTNNTNNTNNTNNTNNTNNTNNTNNTNNTNNTNNTNNTNNTNNTNNTNNTNNTNNTNNTNNTNNTNNTNNTNNTNNTNNTNNTNNTNNTNNTNNTNNTNNTNNTNNTNNTNNTNNTNNTNNTNNTNNTNNTNNTNNTNNTNNTNNTNNTNNTNNTNNTNNTNNTNNTNNTNNTNNTNNTNNTNNTNNTNNTNNTNNTNNTNNTNNTNNTNNTNNTNNTNNTNNTNNTNNTNNTNNTNNTNNTNNTNNTNNTNNTNNTNNTNNTNNTNNTNNTNNTNNTNNTNNTNNTNNTNNTNNTNNTNNTNNTNNTNNTNNTNNTNNTNNTNNTNNTNNTNNTNNTNNTNNTNNTNNTNNTNNTNNTNNTNNTNNTNNTNNTNNTNNTNNTNNTNNTNNTNNTNNTNNTNNTNNTNNTNNTNNTNNTNNTNNTNNTNNTNNTNNTNNTNNTNNTNNTNNTNNTNNTNNTNNTNNTNNTNNTNNTNNTNNTNNTNNTNNTNNTNNTNNTNNTNNT

SEQ ID NO: 107 - protein, 537 aa, Artificial Sequence
  Description of Artificial Sequence: Synthetic peptide
NNTNNTNNTNNTNNTNNTNNTNNTNNTNNTNNTNNTNNTNNTNNTNNTNNTNNTNNTNNTNNTNNTNNTNNTNNTNNTNNTNNTNNTNNTNNTNNTNNTNNTNNTNNTNNTNNTNNTNNTNNTNNTNNTNNTNNTNNTNNTNNTNNTNNTNNTNNTNNTNNTNNTNNTNNTNNTNNTNNTNNTNNTNNTNNTNNTNNTNNTNNTNNTNNTNNTNNTNNTNNTNNTNNTNNTNNTNNTNNTNNTNNTNNTNNTNNTNNTNNTNNTNNTNNTNNTNNTNNTNNTNNTNNTNNTNNTNNTNNTNNTNNTNNTNNTNNTNNTNNTNNTNNTNNTNNTNNTNNTNNTNNTNNTNNTNNTNNTNNTNNTNNTNNTNNTNNTNNTNNTNNTNNTNNTNNTNNTNNTNNTNNTNNTNNTNNTNNTNNTNNTNNTNNTNNTNNTNNTNNTNNTNNTNNTNNTNNTNNTNNTNNTNNTNNTNNTNNTNNTNNTNNTNNTNNTNNTNNTNNTNNTNNTNNTNNTNNTNNTNNTNNTNNTNNTNNTNNT

SEQ ID NO: 108 - protein, 540 aa, Artificial Sequence
  Description of Artificial Sequence: Synthetic peptide
NNTNNTNNTNNTNNTNNTNNTNNTNNTNNTNNTNNTNNTNNTNNTNNTNNTNNTNNTNNTNNTNNTNNTNNTNNTNNTNNTNNTNNTNNTNNTNNTNNTNNTNNTNNTNNTNNTNNTNNTNNTNNTNNTNNTNNTNNTNNTNNTNNTNNTNNTNNTNNTNNTNNTNNTNNTNNTNNTNNTNNTNNTNNTNNTNNTNNTNNTNNTNNTNNTNNTNNTNNTNNTNNTNNTNNTNNTNNTNNTNNTNNTNNTNNTNNTNNTNNTNNTNNTNNTNNTNNTNNTNNTNNTNNTNNTNNTNNTNNTNNTNNTNNTNNTNNTNNTNNTNNTNNTNNTNNTNNTNNTNNTNNTNNTNNTNNTNNTNNTNNTNNTNNTNNTNNTNNTNNTNNTNNTNNTNNTNNTNNTNNTNNTNNTNNTNNTNNTNNTNNTNNTNNTNNTNNTNNTNNTNNTNNTNNTNNTNNTNNTNNTNNTNNTNNTNNTNNTNNTNNTNNTNNTNNTNNTNNTNNTNNTNNTNNTNNTNNTNNTNNTNNTNNTNNTNNTNNTNNT

SEQ ID NO: 109 - protein, 543 aa, Artificial Sequence
  Description of Artificial Sequence: Synthetic peptide
NNTNNTNNTNNTNNTNNTNNTNNTNNTNNTNNTNNTNNTNNTNNTNNTNNTNNTNNTNNTNNTNNTNNTNNTNNTNNTNNTNNTNNTNNTNNTNNTNNTNNTNNTNNTNNTNNTNNTNNTNNTNNTNNTNNTNNTNNTNNTNNTNNTNNTNNTNNTNNTNNTNNTNNTNNTNNTNNTNNTNNTNNTNNTNNTNNTNNTNNTNNTNNTNNTNNTNNTNNTNNTNNTNNTNNTNNTNNTNNTNNTNNTNNTNNTNNTNNTNNTNNTNNTNNTNNTNNTNNTNNTNNTNNTNNTNNTNNTNNTNNTNNTNNTNNTNNTNNTNNTNNTNNTNNTNNTNNTNNTNNTNNTNNTNNTNNTNNTNNTNNTNNTNNTNNTNNTNNTNNTNNTNNTNNTNNTNNTNNTNNTNNTNNTNNTNNTNNTNNTNNTNNTNNTNNTNNTNNTNNTNNTNNTNNTNNTNNTNNTNNTNNTNNTNNTNNTNNTNNTNNTNNTNNTNNTNNTNNTNNTNNTNNTNNTNNTNNTNNTNNTNNTNNTNNTNNTNNTNNTNNT

SEQ ID NO: 110 - protein, 546 aa, Artificial Sequence
  Description of Artificial Sequence: Synthetic peptide
NNTNNTNNTNNTNNTNNTNNTNNTNNTNNTNNTNNTNNTNNTNNTNNTNNTNNTNNTNNTNNTNNTNNTNNTNNTNNTNNTNNTNNTNNTNNTNNTNNTNNTNNTNNTNNTNNTNNTNNTNNTNNTNNTNNTNNTNNTNNTNNTNNTNNTNNTNNTNNTNNTNNTNNTNNTNNTNNTNNTNNTNNTNNTNNTNNTNNTNNTNNTNNTNNTNNTNNTNNTNNTNNTNNTNNTNNTNNTNNTNNTNNTNNTNNTNNTNNTNNTNNTNNTNNTNNTNNTNNTNNTNNTNNTNNTNNTNNTNNTNNTNNTNNTNNTNNTNNTNNTNNTNNTNNTNNTNNTNNTNNTNNTNNTNNTNNTNNTNNTNNTNNTNNTNNTNNTNNTNNTNNTNNTNNTNNTNNTNNTNNTNNTNNTNNTNNTNNTNNTNNTNNTNNTNNTNNTNNTNNTNNTNNTNNTNNTNNTNNTNNTNNTNNTNNTNNTNNTNNTNNTNNTNNTNNTNNTNNTNNTNNTNNTNNTNNTNNTNNTNNTNNTNNTNNTNNTNNTNNTNNTNNT

SEQ ID NO: 111 - protein, 549 aa, Artificial Sequence
  Description of Artificial Sequence: Synthetic peptide
NNTNNTNNTNNTNNTNNTNNTNNTNNTNNTNNTNNTNNTNNTNNTNNTNNTNNTNNTNNTNNTNNTNNTNNTNNTNNTNNTNNTNNTNNTNNTNNTNNTNNTNNTNNTNNTNNTNNTNNTNNTNNTNNTNNTNNTNNTNNTNNTNNTNNTNNTNNTNNTNNTNNTNNTNNTNNTNNTNNTNNTNNTNNTNNTNNTNNTNNTNNTNNTNNTNNTNNTNNTNNTNNTNNTNNTNNTNNTNNTNNTNNTNNTNNTNNTNNTNNTNNTNNTNNTNNTNNTNNTNNTNNTNNTNNTNNTNNTNNTNNTNNTNNTNNTNNTNNTNNTNNTNNTNNTNNTNNTNNTNNTNNTNNTNNTNNTNNTNNTNNTNNTNNTNNTNNTNNTNNTNNTNNTNNTNNTNNTNNTNNTNNTNNTNNTNNTNNTNNTNNTNNTNNTNNTNNTNNTNNTNNTNNTNNTNNTNNTNNTNNTNNTNNTNNTNNTNNTNNTNNTNNTNNTNNTNNTNNTNNTNNTNNTNNTNNTNNTNNTNNTNNTNNTNNTNNTNNTNNTNNTNNTNNT

SEQ ID NO: 112 - protein, 552 aa, Artificial Sequence
  Description of Artificial Sequence: Synthetic peptide
NNTNNTNNTNNTNNTNNTNNTNNTNNTNNTNNTNNTNNTNNTNNTNNTNNTNNTNNTNNTNNTNNTNNTNNTNNTNNTNNTNNTNNTNNTNNTNNTNNTNNTNNTNNTNNTNNTNNTNNTNNTNNTNNTNNTNNTNNTNNTNNTNNTNNTNNTNNTNNTNNTNNTNNTNNTNNTNNTNNTNNTNNTNNTNNTNNTNNTNNTNNTNNTNNTNNTNNTNNTNNTNNTNNTNNTNNTNNTNNTNNTNNTNNTNNTNNTNNTNNTNNTNNTNNTNNTNNTNNTNNTNNTNNTNNTNNTNNTNNTNNTNNTNNTNNTNNTNNTNNTNNTNNTNNTNNTNNTNNTNNTNNTNNTNNTNNTNNTNNTNNTNNTNNTNNTNNTNNTNNTNNTNNTNNTNNTNNTNNTNNTNNTNNTNNTNNTNNTNNTNNTNNTNNTNNTNNTNNTNNTNNTNNTNNTNNTNNTNNTNNTNNTNNTNNTNNTNNTNNTNNTNNTNNTNNTNNTNNTNNTNNTNNTNNTNNTNNTNNTNNTNNTNNTNNTNNTNNTNNTNNTNNTNNTNNT

SEQ ID NO: 113 - protein, 555 aa, Artificial Sequence
  Description of Artificial Sequence: Synthetic peptide
NNTNNTNNTNNTNNTNNTNNTNNTNNTNNTNNTNNTNNTNNTNNTNNTNNTNNTNNTNNTNNTNNTNNTNNTNNTNNTNNTNNTNNTNNTNNTNNTNNTNNTNNTNNTNNTNNTNNTNNTNNTNNTNNTNNTNNTNNTNNTNNTNNTNNTNNTNNTNNTNNTNNTNNTNNTNNTNNTNNTNNTNNTNNTNNTNNTNNTNNTNNTNNTNNTNNTNNTNNTNNTNNTNNTNNTNNTNNTNNTNNTNNTNNTNNTNNTNNTNNTNNTNNTNNTNNTNNTNNTNNTNNTNNTNNTNNTNNTNNTNNTNNTNNTNNTNNTNNTNNTNNTNNTNNTNNTNNTNNTNNTNNTNNTNNTNNTNNTNNTNNTNNTNNTNNTNNTNNTNNTNNTNNTNNTNNTNNTNNTNNTNNTNNTNNTNNTNNTNNTNNTNNTNNTNNTNNTNNTNNTNNTNNTNNTNNTNNTNNTNNTNNTNNTNNTNNTNNTNNTNNTNNTNNTNNTNNTNNTNNTNNTNNTNNTNNTNNTNNTNNTNNTNNTNNTNNTNNTNNTNNTNNTNNTNNTNNT

SEQ ID NO: 114 - protein, 558 aa, Artificial Sequence
  Description of Artificial Sequence: Synthetic peptide
NNTNNTNNTNNTNNTNNTNNTNNTNNTNNTNNTNNTNNTNNTNNTNNTNNTNNTNNTNNTNNTNNTNNTNNTNNTNNTNNTNNTNNTNNTNNTNNTNNTNNTNNTNNTNNTNNTNNTNNTNNTNNTNNTNNTNNTNNTNNTNNTNNTNNTNNTNNTNNTNNTNNTNNTNNTNNTNNTNNTNNTNNTNNTNNTNNTNNTNNTNNTNNTNNTNNTNNTNNTNNTNNTNNTNNTNNTNNTNNTNNTNNTNNTNNTNNTNNTNNTNNTNNTNNTNNTNNTNNTNNTNNTNNTNNTNNTNNTNNTNNTNNTNNTNNTNNTNNTNNTNNTNNTNNTNNTNNTNNTNNTNNTNNTNNTNNTNNTNNTNNTNNTNNTNNTNNTNNTNNTNNTNNTNNTNNTNNTNNTNNTNNTNNTNNTNNTNNTNNTNNTNNTNNTNNTNNTNNTNNTNNTNNTNNTNNTNNTNNTNNTNNTNNTNNTNNTNNTNNTNNTNNTNNTNNTNNTNNTNNTNNTNNTNNTNNTNNTNNTNNTNNTNNTNNTNNTNNTNNTNNTNNTNNTNNTNNTNNT

SEQ ID NO: 115 - protein, 561 aa, Artificial Sequence
  Description of Artificial Sequence: Synthetic peptide
NNTNNTNNTNNTNNTNNTNNTNNTNNTNNTNNTNNTNNTNNTNNTNNTNNTNNTNNTNNTNNTNNTNNTNNTNNTNNTNNTNNTNNTNNTNNTNNTNNTNNTNNTNNTNNTNNTNNTNNTNNTNNTNNTNNTNNTNNTNNTNNTNNTNNTNNTNNTNNTNNTNNTNNTNNTNNTNNTNNTNNTNNTNNTNNTNNTNNTNNTNNTNNTNNTNNTNNTNNTNNTNNTNNTNNTNNTNNTNNTNNTNNTNNTNNTNNTNNTNNTNNTNNTNNTNNTNNTNNTNNTNNTNNTNNTNNTNNTNNTNNTNNTNNTNNTNNTNNTNNTNNTNNTNNTNNTNNTNNTNNTNNTNNTNNTNNTNNTNNTNNTNNTNNTNNTNNTNNTNNTNNTNNTNNTNNTNNTNNTNNTNNTNNTNNTNNTNNTNNTNNTNNTNNTNNTNNTNNTNNTNNTNNTNNTNNTNNTNNTNNTNNTNNTNNTNNTNNTNNTNNTNNTNNTNNTNNTNNTNNTNNTNNTNNTNNTNNTNNTNNTNNTNNTNNTNNTNNTNNTNNTNNTNNTNNTNNTNNTNNT

SEQ ID NO: 116 - protein, 564 aa, Artificial Sequence
  Description of Artificial Sequence: Synthetic peptide
NNTNNTNNTNNTNNTNNTNNTNNTNNTNNTNNTNNTNNTNNTNNTNNTNNTNNTNNTNNTNNTNNTNNTNNTNNTNNTNNTNNTNNTNNTNNTNNTNNTNNTNNTNNTNNTNNTNNTNNTNNTNNTNNTNNTNNTNNTNNTNNTNNTNNTNNTNNTNNTNNTNNTNNTNNTNNTNNTNNTNNTNNTNNTNNTNNTNNTNNTNNTNNTNNTNNTNNTNNTNNTNNTNNTNNTNNTNNTNNTNNTNNTNNTNNTNNTNNTNNTNNTNNTNNTNNTNNTNNTNNTNNTNNTNNTNNTNNTNNTNNTNNTNNTNNTNNTNNTNNTNNTNNTNNTNNTNNTNNTNNTNNTNNTNNTNNTNNTNNTNNTNNTNNTNNTNNTNNTNNTNNTNNTNNTNNTNNTNNTNNTNNTNNTNNTNNTNNTNNTNNTNNTNNTNNTNNTNNTNNTNNTNNTNNTNNTNNTNNTNNTNNTNNTNNTNNTNNTNNTNNTNNTNNTNNTNNTNNTNNTNNTNNTNNTNNTNNTNNTNNTNNTNNTNNTNNTNNTNNTNNTNNTNNTNNTNNTNNTNNTNNT

SEQ ID NO: 117 - protein, 567 aa, Artificial Sequence
  Description of Artificial Sequence: Synthetic peptide
NNTNNTNNTNNTNNTNNTNNTNNTNNTNNTNNTNNTNNTNNTNNTNNTNNTNNTNNTNNTNNTNNTNNTNNTNNTNNTNNTNNTNNTNNTNNTNNTNNTNNTNNTNNTNNTNNTNNTNNTNNTNNTNNTNNTNNTNNTNNTNNTNNTNNTNNTNNTNNTNNTNNTNNTNNTNNTNNTNNTNNTNNTNNTNNTNNTNNTNNTNNTNNTNNTNNTNNTNNTNNTNNTNNTNNTNNTNNTNNTNNTNNTNNTNNTNNTNNTNNTNNTNNTNNTNNTNNTNNTNNTNNTNNTNNTNNTNNTNNTNNTNNTNNTNNTNNTNNTNNTNNTNNTNNTNNTNNTNNTNNTNNTNNTNNTNNTNNTNNTNNTNNTNNTNNTNNTNNTNNTNNTNNTNNTNNTNNTNNTNNTNNTNNTNNTNNTNNTNNTNNTNNTNNTNNTNNTNNTNNTNNTNNTNNTNNTNNTNNTNNTNNTNNTNNTNNTNNTNNTNNTNNTNNTNNTNNTNNTNNTNNTNNTNNTNNTNNTNNTNNTNNTNNTNNTNNTNNTNNTNNTNNTNNTNNTNNTNNTNNTNNTNNT

SEQ ID NO: 118 - protein, 570 aa, Artificial Sequence
  Description of Artificial Sequence: Synthetic peptide
NNTNNTNNTNNTNNTNNTNNTNNTNNTNNTNNTNNTNNTNNTNNTNNTNNTNNTNNTNNTNNTNNTNNTNNTNNTNNTNNTNNTNNTNNTNNTNNTNNTNNTNNTNNTNNTNNTNNTNNTNNTNNTNNTNNTNNTNNTNNTNNTNNTNNTNNTNNTNNTNNTNNTNNTNNTNNTNNTNNTNNTNNTNNTNNTNNTNNTNNTNNTNNTNNTNNTNNTNNTNNTNNTNNTNNTNNTNNTNNTNNTNNTNNTNNTNNTNNTNNTNNTNNTNNTNNTNNTNNTNNTNNTNNTNNTNNTNNTNNTNNTNNTNNTNNTNNTNNTNNTNNTNNTNNTNNTNNTNNTNNTNNTNNTNNTNNTNNTNNTNNTNNTNNTNNTNNTNNTNNTNNTNNTNNTNNTNNTNNTNNTNNTNNTNNTNNTNNTNNTNNTNNTNNTNNTNNTNNTNNTNNTNNTNNTNNTNNTNNTNNTNNTNNTNNTNNTNNTNNTNNTNNTNNTNNTNNTNNTNNTNNTNNTNNTNNTNNTNNTNNTNNTNNTNNTNNTNNTNNTNNTNNTNNTNNTNNTNNTNNTNNTNNTNNT

SEQ ID NO: 119 - protein, 573 aa, Artificial Sequence
  Description of Artificial Sequence: Synthetic peptide
NNTNNTNNTNNTNNTNNTNNTNNTNNTNNTNNTNNTNNTNNTNNTNNTNNTNNTNNTNNTNNTNNTNNTNNTNNTNNTNNTNNTNNTNNTNNTNNTNNTNNTNNTNNTNNTNNTNNTNNTNNTNNTNNTNNTNNTNNTNNTNNTNNTNNTNNTNNTNNTNNTNNTNNTNNTNNTNNTNNTNNTNNTNNTNNTNNTNNTNNTNNTNNTNNTNNTNNTNNTNNTNNTNNTNNTNNTNNTNNTNNTNNTNNTNNTNNTNNTNNTNNTNNTNNTNNTNNTNNTNNTNNTNNTNNTNNTNNTNNTNNTNNTNNTNNTNNTNNTNNTNNTNNTNNTNNTNNTNNTNNTNNTNNTNNTNNTNNTNNTNNTNNTNNTNNTNNTNNTNNTNNTNNTNNTNNTNNTNNTNNTNNTNNTNNTNNTNNTNNTNNTNNTNNTNNTNNTNNTNNTNNTNNTNNTNNTNNTNNTNNTNNTNNTNNTNNTNNTNNTNNTNNTNNTNNTNNTNNTNNTNNTNNTNNTNNTNNTNNTNNTNNTNNTNNTNNTNNTNNTNNTNNTNNTNNTNNTNNTNNTNNTNNTNNTNNT

SEQ ID NO: 120 - protein, 576 aa, Artificial Sequence
  Description of Artificial Sequence: Synthetic peptide
NNTNNTNNTNNTNNTNNTNNTNNTNNTNNTNNTNNTNNTNNTNNTNNTNNTNNTNNTNNTNNTNNTNNTNNTNNTNNTNNTNNTNNTNNTNNTNNTNNTNNTNNTNNTNNTNNTNNTNNTNNTNNTNNTNNTNNTNNTNNTNNTNNTNNTNNTNNTNNTNNTNNTNNTNNTNNTNNTNNTNNTNNTNNTNNTNNTNNTNNTNNTNNTNNTNNTNNTNNTNNTNNTNNTNNTNNTNNTNNTNNTNNTNNTNNTNNTNNTNNTNNTNNTNNTNNTNNTNNTNNTNNTNNTNNTNNTNNTNNTNNTNNTNNTNNTNNTNNTNNTNNTNNTNNTNNTNNTNNTNNTNNTNNTNNTNNTNNTNNTNNTNNTNNTNNTNNTNNTNNTNNTNNTNNTNNTNNTNNTNNTNNTNNTNNTNNTNNTNNTNNTNNTNNTNNTNNTNNTNNTNNTNNTNNTNNTNNTNNTNNTNNTNNTNNTNNTNNTNNTNNTNNTNNTNNTNNTNNTNNTNNTNNTNNTNNTNNTNNTNNTNNTNNTNNTNNTNNTNNTNNTNNTNNTNNTNNTNNTNNTNNTNNTNNTNNTNNT

SEQ ID NO: 121 - protein, 579 aa, Artificial Sequence
  Description of Artificial Sequence: Synthetic peptide
NNTNNTNNTNNTNNTNNTNNTNNTNNTNNTNNTNNTNNTNNTNNTNNTNNTNNTNNTNNTNNTNNTNNTNNTNNTNNTNNTNNTNNTNNTNNTNNTNNTNNTNNTNNTNNTNNTNNTNNTNNTNNTNNTNNTNNTNNTNNTNNTNNTNNTNNTNNTNNTNNTNNTNNTNNTNNTNNTNNTNNTNNTNNTNNTNNTNNTNNTNNTNNTNNTNNTNNTNNTNNTNNTNNTNNTNNTNNTNNTNNTNNTNNTNNTNNTNNTNNTNNTNNTNNTNNTNNTNNTNNTNNTNNTNNTNNTNNTNNTNNTNNTNNTNNTNNTNNTNNTNNTNNTNNTNNTNNTNNTNNTNNTNNTNNTNNTNNTNNTNNTNNTNNTNNTNNTNNTNNTNNTNNTNNTNNTNNTNNTNNTNNTNNTNNTNNTNNTNNTNNTNNTNNTNNTNNTNNTNNTNNTNNTNNTNNTNNTNNTNNTNNTNNTNNTNNTNNTNNTNNTNNTNNTNNTNNTNNTNNTNNTNNTNNTNNTNNTNNTNNTNNTNNTNNTNNTNNTNNTNNTNNTNNTNNTNNTNNTNNTNNTNNTNNTNNTNNTNNT

SEQ ID NO: 122 - protein, 582 aa, Artificial Sequence
  Description of Artificial Sequence: Synthetic peptide
NNTNNTNNTNNTNNTNNTNNTNNTNNTNNTNNTNNTNNTNNTNNTNNTNNTNNTNNTNNTNNTNNTNNTNNTNNTNNTNNTNNTNNTNNTNNTNNTNNTNNTNNTNNTNNTNNTNNTNNTNNTNNTNNTNNTNNTNNTNNTNNTNNTNNTNNTNNTNNTNNTNNTNNTNNTNNTNNTNNTNNTNNTNNTNNTNNTNNTNNTNNTNNTNNTNNTNNTNNTNNTNNTNNTNNTNNTNNTNNTNNTNNTNNTNNTNNTNNTNNTNNTNNTNNTNNTNNTNNTNNTNNTNNTNNTNNTNNTNNTNNTNNTNNTNNTNNTNNTNNTNNTNNTNNTNNTNNTNNTNNTNNTNNTNNTNNTNNTNNTNNTNNTNNTNNTNNTNNTNNTNNTNNTNNTNNTNNTNNTNNTNNTNNTNNTNNTNNTNNTNNTNNTNNTNNTNNTNNTNNTNNTNNTNNTNNTNNTNNTNNTNNTNNTNNTNNTNNTNNTNNTNNTNNTNNTNNTNNTNNTNNTNNTNNTNNTNNTNNTNNTNNTNNTNNTNNTNNTNNTNNTNNTNNTNNTNNTNNTNNTNNTNNTNNTNNTNNTNNTNNT

SEQ ID NO: 123 - protein, 585 aa, Artificial Sequence
  Description of Artificial Sequence: Synthetic peptide
NNTNNTNNTNNTNNTNNTNNTNNTNNTNNTNNTNNTNNTNNTNNTNNTNNTNNTNNTNNTNNTNNTNNTNNTNNTNNTNNTNNTNNTNNTNNTNNTNNTNNTNNTNNTNNTNNTNNTNNTNNTNNTNNTNNTNNTNNTNNTNNTNNTNNTNNTNNTNNTNNTNNTNNTNNTNNTNNTNNTNNTNNTNNTNNTNNTNNTNNTNNTNNTNNTNNTNNTNNTNNTNNTNNTNNTNNTNNTNNTNNTNNTNNTNNTNNTNNTNNTNNTNNTNNTNNTNNTNNTNNTNNTNNTNNTNNTNNTNNTNNTNNTNNTNNTNNTNNTNNTNNTNNTNNTNNTNNTNNTNNTNNTNNTNNTNNTNNTNNTNNTNNTNNTNNTNNTNNTNNTNNTNNTNNTNNTNNTNNTNNTNNTNNTNNTNNTNNTNNTNNTNNTNNTNNTNNTNNTNNTNNTNNTNNTNNTNNTNNTNNTNNTNNTNNTNNTNNTNNTNNTNNTNNTNNTNNTNNTNNTNNTNNTNNTNNTNNTNNTNNTNNTNNTNNTNNTNNTNNTNNTNNTNNTNNTNNTNNTNNTNNTNNTNNTNNTNNTNNTNNTNNT

SEQ ID NO: 124 - protein, 588 aa, Artificial Sequence
  Description of Artificial Sequence: Synthetic peptide
NNTNNTNNTNNTNNTNNTNNTNNTNNTNNTNNTNNTNNTNNTNNTNNTNNTNNTNNTNNTNNTNNTNNTNNTNNTNNTNNTNNTNNTNNTNNTNNTNNTNNTNNTNNTNNTNNTNNTNNTNNTNNTNNTNNTNNTNNTNNTNNTNNTNNTNNTNNTNNTNNTNNTNNTNNTNNTNNTNNTNNTNNTNNTNNTNNTNNTNNTNNTNNTNNTNNTNNTNNTNNTNNTNNTNNTNNTNNTNNTNNTNNTNNTNNTNNTNNTNNTNNTNNTNNTNNTNNTNNTNNTNNTNNTNNTNNTNNTNNTNNTNNTNNTNNTNNTNNTNNTNNTNNTNNTNNTNNTNNTNNTNNTNNTNNTNNTNNTNNTNNTNNTNNTNNTNNTNNTNNTNNTNNTNNTNNTNNTNNTNNTNNTNNTNNTNNTNNTNNTNNTNNTNNTNNTNNTNNTNNTNNTNNTNNTNNTNNTNNTNNTNNTNNTNNTNNTNNTNNTNNTNNTNNTNNTNNTNNTNNTNNTNNTNNTNNTNNTNNTNNTNNTNNTNNTNNTNNTNNTNNTNNTNNTNNTNNTNNTNNTNNTNNTNNTNNTNNTNNTNNTNNTNNT

SEQ ID NO: 125 - protein, 591 aa, Artificial Sequence
  Description of Artificial Sequence: Synthetic peptide
NNTNNTNNTNNTNNTNNTNNTNNTNNTNNTNNTNNTNNTNNTNNTNNTNNTNNTNNTNNTNNTNNTNNTNNTNNTNNTNNTNNTNNTNNTNNTNNTNNTNNTNNTNNTNNTNNTNNTNNTNNTNNTNNTNNTNNTNNTNNTNNTNNTNNTNNTNNTNNTNNTNNTNNTNNTNNTNNTNNTNNTNNTNNTNNTNNTNNTNNTNNTNNTNNTNNTNNTNNTNNTNNTNNTNNTNNTNNTNNTNNTNNTNNTNNTNNTNNTNNTNNTNNTNNTNNTNNTNNTNNTNNTNNTNNTNNTNNTNNTNNTNNTNNTNNTNNTNNTNNTNNTNNTNNTNNTNNTNNTNNTNNTNNTNNTNNTNNTNNTNNTNNTNNTNNTNNTNNTNNTNNTNNTNNTNNTNNTNNTNNTNNTNNTNNTNNTNNTNNTNNTNNTNNTNNTNNTNNTNNTNNTNNTNNTNNTNNTNNTNNTNNTNNTNNTNNTNNTNNTNNTNNTNNTNNTNNTNNTNNTNNTNNTNNTNNTNNTNNTNNTNNTNNTNNTNNTNNTNNTNNTNNTNNTNNTNNTNNTNNTNNTNNTNNTNNTNNTNNTNNTNNTNNTNNT

SEQ ID NO: 126 - protein, 594 aa, Artificial Sequence
  Description of Artificial Sequence: Synthetic peptide
NNTNNTNNTNNTNNTNNTNNTNNTNNTNNTNNTNNTNNTNNTNNTNNTNNTNNTNNTNNTNNTNNTNNTNNTNNTNNTNNTNNTNNTNNTNNTNNTNNTNNTNNTNNTNNTNNTNNTNNTNNTNNTNNTNNTNNTNNTNNTNNTNNTNNTNNTNNTNNTNNTNNTNNTNNTNNTNNTNNTNNTNNTNNTNNTNNTNNTNNTNNTNNTNNTNNTNNTNNTNNTNNTNNTNNTNNTNNTNNTNNTNNTNNTNNTNNTNNTNNTNNTNNTNNTNNTNNTNNTNNTNNTNNTNNTNNTNNTNNTNNTNNTNNTNNTNNTNNTNNTNNTNNTNNTNNTNNTNNTNNTNNTNNTNNTNNTNNTNNTNNTNNTNNTNNTNNTNNTNNTNNTNNTNNTNNTNNTNNTNNTNNTNNTNNTNNTNNTNNTNNTNNTNNTNNTNNTNNTNNTNNTNNTNNTNNTNNTNNTNNTNNTNNTNNTNNTNNTNNTNNTNNTNNTNNTNNTNNTNNTNNTNNTNNTNNTNNTNNTNNTNNTNNTNNTNNTNNTNNTNNTNNTNNTNNTNNTNNTNNTNNTNNTNNTNNTNNTNNTNNTNNTNNTNNTNNT

SEQ ID NO: 127 - protein, 597 aa, Artificial Sequence
  Description of Artificial Sequence: Synthetic peptide
NNTNNTNNTNNTNNTNNTNNTNNTNNTNNTNNTNNTNNTNNTNNTNNTNNTNNTNNTNNTNNTNNTNNTNNTNNTNNTNNTNNTNNTNNTNNTNNTNNTNNTNNTNNTNNTNNTNNTNNTNNTNNTNNTNNTNNTNNTNNTNNTNNTNNTNNTNNTNNTNNTNNTNNTNNTNNTNNTNNTNNTNNTNNTNNTNNTNNTNNTNNTNNTNNTNNTNNTNNTNNTNNTNNTNNTNNTNNTNNTNNTNNTNNTNNTNNTNNTNNTNNTNNTNNTNNTNNTNNTNNTNNTNNTNNTNNTNNTNNTNNTNNTNNTNNTNNTNNTNNTNNTNNTNNTNNTNNTNNTNNTNNTNNTNNTNNTNNTNNTNNTNNTNNTNNTNNTNNTNNTNNTNNTNNTNNTNNTNNTNNTNNTNNTNNTNNTNNTNNTNNTNNTNNTNNTNNTNNTNNTNNTNNTNNTNNTNNTNNTNNTNNTNNTNNTNNTNNTNNTNNTNNTNNTNNTNNTNNTNNTNNTNNTNNTNNTNNTNNTNNTNNTNNTNNTNNTNNTNNTNNTNNTNNTNNTNNTNNTNNTNNTNNTNNTNNTNNTNNTNNTNNTNNTNNTNNTNNT

SEQ ID NO: 128 - protein, 600 aa, Artificial Sequence
  Description of Artificial Sequence: Synthetic peptide
NNTNNTNNTNNTNNTNNTNNTNNTNNTNNTNNTNNTNNTNNTNNTNNTNNTNNTNNTNNTNNTNNTNNTNNTNNTNNTNNTNNTNNTNNTNNTNNTNNTNNTNNTNNTNNTNNTNNTNNTNNTNNTNNTNNTNNTNNTNNTNNTNNTNNTNNTNNTNNTNNTNNTNNTNNTNNTNNTNNTNNTNNTNNTNNTNNTNNTNNTNNTNNTNNTNNTNNTNNTNNTNNTNNTNNTNNTNNTNNTNNTNNTNNTNNTNNTNNTNNTNNTNNTNNTNNTNNTNNTNNTNNTNNTNNTNNTNNTNNTNNTNNTNNTNNTNNTNNTNNTNNTNNTNNTNNTNNTNNTNNTNNTNNTNNTNNTNNTNNTNNTNNTNNTNNTNNTNNTNNTNNTNNTNNTNNTNNTNNTNNTNNTNNTNNTNNTNNTNNTNNTNNTNNTNNTNNTNNTNNTNNTNNTNNTNNTNNTNNTNNTNNTNNTNNTNNTNNTNNTNNTNNTNNTNNTNNTNNTNNTNNTNNTNNTNNTNNTNNTNNTNNTNNTNNTNNTNNTNNTNNTNNTNNTNNTNNTNNTNNTNNTNNTNNTNNTNNTNNTNNTNNTNNTNNTNNTNNTNNT

SEQ ID NO: 129 - protein, 603 aa, Artificial Sequence
  Description of Artificial Sequence: Synthetic peptide
NNTNNTNNTNNTNNTNNTNNTNNTNNTNNTNNTNNTNNTNNTNNTNNTNNTNNTNNTNNTNNTNNTNNTNNTNNTNNTNNTNNTNNTNNTNNTNNTNNTNNTNNTNNTNNTNNTNNTNNTNNTNNTNNTNNTNNTNNTNNTNNTNNTNNTNNTNNTNNTNNTNNTNNTNNTNNTNNTNNTNNTNNTNNTNNTNNTNNTNNTNNTNNTNNTNNTNNTNNTNNTNNTNNTNNTNNTNNTNNTNNTNNTNNTNNTNNTNNTNNTNNTNNTNNTNNTNNTNNTNNTNNTNNTNNTNNTNNTNNTNNTNNTNNTNNTNNTNNTNNTNNTNNTNNTNNTNNTNNTNNTNNTNNTNNTNNTNNTNNTNNTNNTNNTNNTNNTNNTNNTNNTNNTNNTNNTNNTNNTNNTNNTNNTNNTNNTNNTNNTNNTNNTNNTNNTNNTNNTNNTNNTNNTNNTNNTNNTNNTNNTNNTNNTNNTNNTNNTNNTNNTNNTNNTNNTNNTNNTNNTNNTNNTNNTNNTNNTNNTNNTNNTNNTNNTNNTNNTNNTNNTNNTNNTNNTNNTNNTNNTNNTNNTNNTNNTNNTNNTNNTNNTNNTNNTNNTNNTNNTNNT

SEQ ID NO: 130 - protein, 606 aa, Artificial Sequence
  Description of Artificial Sequence: Synthetic peptide
NNTNNTNNTNNTNNTNNTNNTNNTNNTNNTNNTNNTNNTNNTNNTNNTNNTNNTNNTNNTNNTNNTNNTNNTNNTNNTNNTNNTNNTNNTNNTNNTNNTNNTNNTNNTNNTNNTNNTNNTNNTNNTNNTNNTNNTNNTNNTNNTNNTNNTNNTNNTNNTNNTNNTNNTNNTNNTNNTNNTNNTNNTNNTNNTNNTNNTNNTNNTNNTNNTNNTNNTNNTNNTNNTNNTNNTNNTNNTNNTNNTNNTNNTNNTNNTNNTNNTNNTNNTNNTNNTNNTNNTNNTNNTNNTNNTNNTNNTNNTNNTNNTNNTNNTNNTNNTNNTNNTNNTNNTNNTNNTNNTNNTNNTNNTNNTNNTNNTNNTNNTNNTNNTNNTNNTNNTNNTNNTNNTNNTNNTNNTNNTNNTNNTNNTNNTNNTNNTNNTNNTNNTNNTNNTNNTNNTNNTNNTNNTNNTNNTNNTNNTNNTNNTNNTNNTNNTNNTNNTNNTNNTNNTNNTNNTNNTNNTNNTNNTNNTNNTNNTNNTNNTNNTNNTNNTNNTNNTNNTNNTNNTNNTNNTNNTNNTNNTNNTNNTNNTNNTNNTNNTNNTNNTNNTNNTNNTNNTNNTNNTNNT

SEQ ID NO: 131 - protein, 609 aa, Artificial Sequence
  Description of Artificial Sequence: Synthetic peptide
NNTNNTNNTNNTNNTNNTNNTNNTNNTNNTNNTNNTNNTNNTNNTNNTNNTNNTNNTNNTNNTNNTNNTNNTNNTNNTNNTNNTNNTNNTNNTNNTNNTNNTNNTNNTNNTNNTNNTNNTNNTNNTNNTNNTNNTNNTNNTNNTNNTNNTNNTNNTNNTNNTNNTNNTNNTNNTNNTNNTNNTNNTNNTNNTNNTNNTNNTNNTNNTNNTNNTNNTNNTNNTNNTNNTNNTNNTNNTNNTNNTNNTNNTNNTNNTNNTNNTNNTNNTNNTNNTNNTNNTNNTNNTNNTNNTNNTNNTNNTNNTNNTNNTNNTNNTNNTNNTNNTNNTNNTNNTNNTNNTNNTNNTNNTNNTNNTNNTNNTNNTNNTNNTNNTNNTNNTNNTNNTNNTNNTNNTNNTNNTNNTNNTNNTNNTNNTNNTNNTNNTNNTNNTNNTNNTNNTNNTNNTNNTNNTNNTNNTNNTNNTNNTNNTNNTNNTNNTNNTNNTNNTNNTNNTNNTNNTNNTNNTNNTNNTNNTNNTNNTNNTNNTNNTNNTNNTNNTNNTNNTNNTNNTNNTNNTNNTNNTNNTNNTNNTNNTNNTNNTNNTNNTNNTNNTNNTNNTNNTNNTNNTNNT

SEQ ID NO: 132 - protein, 612 aa, Artificial Sequence
  Description of Artificial Sequence: Synthetic peptide
NNTNNTNNTNNTNNTNNTNNTNNTNNTNNTNNTNNTNNTNNTNNTNNTNNTNNTNNTNNTNNTNNTNNTNNTNNTNNTNNTNNTNNTNNTNNTNNTNNTNNTNNTNNTNNTNNTNNTNNTNNTNNTNNTNNTNNTNNTNNTNNTNNTNNTNNTNNTNNTNNTNNTNNTNNTNNTNNTNNTNNTNNTNNTNNTNNTNNTNNTNNTNNTNNTNNTNNTNNTNNTNNTNNTNNTNNTNNTNNTNNTNNTNNTNNTNNTNNTNNTNNTNNTNNTNNTNNTNNTNNTNNTNNTNNTNNTNNTNNTNNTNNTNNTNNTNNTNNTNNTNNTNNTNNTNNTNNTNNTNNTNNTNNTNNTNNTNNTNNTNNTNNTNNTNNTNNTNNTNNTNNTNNTNNTNNTNNTNNTNNTNNTNNTNNTNNTNNTNNTNNTNNTNNTNNTNNTNNTNNTNNTNNTNNTNNTNNTNNTNNTNNTNNTNNTNNTNNTNNTNNTNNTNNTNNTNNTNNTNNTNNTNNTNNTNNTNNTNNTNNTNNTNNTNNTNNTNNTNNTNNTNNTNNTNNTNNTNNTNNTNNTNNTNNTNNTNNTNNTNNTNNTNNTNNTNNTNNTNNTNNTNNTNNTNNT

SEQ ID NO: 133 - protein, 615 aa, Artificial Sequence
  Description of Artificial Sequence: Synthetic peptide
NNTNNTNNTNNTNNTNNTNNTNNTNNTNNTNNTNNTNNTNNTNNTNNTNNTNNTNNTNNTNNTNNTNNTNNTNNTNNTNNTNNTNNTNNTNNTNNTNNTNNTNNTNNTNNTNNTNNTNNTNNTNNTNNTNNTNNTNNTNNTNNTNNTNNTNNTNNTNNTNNTNNTNNTNNTNNTNNTNNTNNTNNTNNTNNTNNTNNTNNTNNTNNTNNTNNTNNTNNTNNTNNTNNTNNTNNTNNTNNTNNTNNTNNTNNTNNTNNTNNTNNTNNTNNTNNTNNTNNTNNTNNTNNTNNTNNTNNTNNTNNTNNTNNTNNTNNTNNTNNTNNTNNTNNTNNTNNTNNTNNTNNTNNTNNTNNTNNTNNTNNTNNTNNTNNTNNTNNTNNTNNTNNTNNTNNTNNTNNTNNTNNTNNTNNTNNTNNTNNTNNTNNTNNTNNTNNTNNTNNTNNTNNTNNTNNTNNTNNTNNTNNTNNTNNTNNTNNTNNTNNTNNTNNTNNTNNTNNTNNTNNTNNTNNTNNTNNTNNTNNTNNTNNTNNTNNTNNTNNTNNTNNTNNTNNTNNTNNTNNTNNTNNTNNTNNTNNTNNTNNTNNTNNTNNTNNTNNTNNTNNTNNTNNTNNTNNT

SEQ ID NO: 134 - protein, 618 aa, Artificial Sequence
  Description of Artificial Sequence: Synthetic peptide
NNTNNTNNTNNTNNTNNTNNTNNTNNTNNTNNTNNTNNTNNTNNTNNTNNTNNTNNTNNTNNTNNTNNTNNTNNTNNTNNTNNTNNTNNTNNTNNTNNTNNTNNTNNTNNTNNTNNTNNTNNTNNTNNTNNTNNTNNTNNTNNTNNTNNTNNTNNTNNTNNTNNTNNTNNTNNTNNTNNTNNTNNTNNTNNTNNTNNTNNTNNTNNTNNTNNTNNTNNTNNTNNTNNTNNTNNTNNTNNTNNTNNTNNTNNTNNTNNTNNTNNTNNTNNTNNTNNTNNTNNTNNTNNTNNTNNTNNTNNTNNTNNTNNTNNTNNTNNTNNTNNTNNTNNTNNTNNTNNTNNTNNTNNTNNTNNTNNTNNTNNTNNTNNTNNTNNTNNTNNTNNTNNTNNTNNTNNTNNTNNTNNTNNTNNTNNTNNTNNTNNTNNTNNTNNTNNTNNTNNTNNTNNTNNTNNTNNTNNTNNTNNTNNTNNTNNTNNTNNTNNTNNTNNTNNTNNTNNTNNTNNTNNTNNTNNTNNTNNTNNTNNTNNTNNTNNTNNTNNTNNTNNTNNTNNTNNTNNTNNTNNTNNTNNTNNTNNTNNTNNTNNTNNTNNTNNTNNTNNTNNTNNTNNTNNTNNTNNT

SEQ ID NO: 135 - protein, 621 aa, Artificial Sequence
  Description of Artificial Sequence: Synthetic peptide
NNTNNTNNTNNTNNTNNTNNTNNTNNTNNTNNTNNTNNTNNTNNTNNTNNTNNTNNTNNTNNTNNTNNTNNTNNTNNTNNTNNTNNTNNTNNTNNTNNTNNTNNTNNTNNTNNTNNTNNTNNTNNTNNTNNTNNTNNTNNTNNTNNTNNTNNTNNTNNTNNTNNTNNTNNTNNTNNTNNTNNTNNTNNTNNTNNTNNTNNTNNTNNTNNTNNTNNTNNTNNTNNTNNTNNTNNTNNTNNTNNTNNTNNTNNTNNTNNTNNTNNTNNTNNTNNTNNTNNTNNTNNTNNTNNTNNTNNTNNTNNTNNTNNTNNTNNTNNTNNTNNTNNTNNTNNTNNTNNTNNTNNTNNTNNTNNTNNTNNTNNTNNTNNTNNTNNTNNTNNTNNTNNTNNTNNTNNTNNTNNTNNTNNTNNTNNTNNTNNTNNTNNTNNTNNTNNTNNTNNTNNTNNTNNTNNTNNTNNTNNTNNTNNTNNTNNTNNTNNTNNTNNTNNTNNTNNTNNTNNTNNTNNTNNTNNTNNTNNTNNTNNTNNTNNTNNTNNTNNTNNTNNTNNTNNTNNTNNTNNTNNTNNTNNTNNTNNTNNTNNTNNTNNTNNTNNTNNTNNTNNTNNTNNTNNTNNTNNTNNT

SEQ ID NO: 136 - protein, 624 aa, Artificial Sequence
  Description of Artificial Sequence: Synthetic peptide
NNTNNTNNTNNTNNTNNTNNTNNTNNTNNTNNTNNTNNTNNTNNTNNTNNTNNTNNTNNTNNTNNTNNTNNTNNTNNTNNTNNTNNTNNTNNTNNTNNTNNTNNTNNTNNTNNTNNTNNTNNTNNTNNTNNTNNTNNTNNTNNTNNTNNTNNTNNTNNTNNTNNTNNTNNTNNTNNTNNTNNTNNTNNTNNTNNTNNTNNTNNTNNTNNTNNTNNTNNTNNTNNTNNTNNTNNTNNTNNTNNTNNTNNTNNTNNTNNTNNTNNTNNTNNTNNTNNTNNTNNTNNTNNTNNTNNTNNTNNTNNTNNTNNTNNTNNTNNTNNTNNTNNTNNTNNTNNTNNTNNTNNTNNTNNTNNTNNTNNTNNTNNTNNTNNTNNTNNTNNTNNTNNTNNTNNTNNTNNTNNTNNTNNTNNTNNTNNTNNTNNTNNTNNTNNTNNTNNTNNTNNTNNTNNTNNTNNTNNTNNTNNTNNTNNTNNTNNTNNTNNTNNTNNTNNTNNTNNTNNTNNTNNTNNTNNTNNTNNTNNTNNTNNTNNTNNTNNTNNTNNTNNTNNTNNTNNTNNTNNTNNTNNTNNTNNTNNTNNTNNTNNTNNTNNTNNTNNTNNTNNTNNTNNTNNTNNTNNTNNTNNT

SEQ ID NO: 137 - protein, 627 aa, Artificial Sequence
  Description of Artificial Sequence: Synthetic peptide
NNTNNTNNTNNTNNTNNTNNTNNTNNTNNTNNTNNTNNTNNTNNTNNTNNTNNTNNTNNTNNTNNTNNTNNTNNTNNTNNTNNTNNTNNTNNTNNTNNTNNTNNTNNTNNTNNTNNTNNTNNTNNTNNTNNTNNTNNTNNTNNTNNTNNTNNTNNTNNTNNTNNTNNTNNTNNTNNTNNTNNTNNTNNTNNTNNTNNTNNTNNTNNTNNTNNTNNTNNTNNTNNTNNTNNTNNTNNTNNTNNTNNTNNTNNTNNTNNTNNTNNTNNTNNTNNTNNTNNTNNTNNTNNTNNTNNTNNTNNTNNTNNTNNTNNTNNTNNTNNTNNTNNTNNTNNTNNTNNTNNTNNTNNTNNTNNTNNTNNTNNTNNTNNTNNTNNTNNTNNTNNTNNTNNTNNTNNTNNTNNTNNTNNTNNTNNTNNTNNTNNTNNTNNTNNTNNTNNTNNTNNTNNTNNTNNTNNTNNTNNTNNTNNTNNTNNTNNTNNTNNTNNTNNTNNTNNTNNTNNTNNTNNTNNTNNTNNTNNTNNTNNTNNTNNTNNTNNTNNTNNTNNTNNTNNTNNTNNTNNTNNTNNTNNTNNTNNTNNTNNTNNTNNTNNTNNTNNTNNTNNTNNTNNTNNTNNTNNTNNTNNTNNT

SEQ ID NO: 138 - protein, 630 aa, Artificial Sequence
  Description of Artificial Sequence: Synthetic peptide
NNTNNTNNTNNTNNTNNTNNTNNTNNTNNTNNTNNTNNTNNTNNTNNTNNTNNTNNTNNTNNTNNTNNTNNTNNTNNTNNTNNTNNTNNTNNTNNTNNTNNTNNTNNTNNTNNTNNTNNTNNTNNTNNTNNTNNTNNTNNTNNTNNTNNTNNTNNTNNTNNTNNTNNTNNTNNTNNTNNTNNTNNTNNTNNTNNTNNTNNTNNTNNTNNTNNTNNTNNTNNTNNTNNTNNTNNTNNTNNTNNTNNTNNTNNTNNTNNTNNTNNTNNTNNTNNTNNTNNTNNTNNTNNTNNTNNTNNTNNTNNTNNTNNTNNTNNTNNTNNTNNTNNTNNTNNTNNTNNTNNTNNTNNTNNTNNTNNTNNTNNTNNTNNTNNTNNTNNTNNTNNTNNTNNTNNTNNTNNTNNTNNTNNTNNTNNTNNTNNTNNTNNTNNTNNTNNTNNTNNTNNTNNTNNTNNTNNTNNTNNTNNTNNTNNTNNTNNTNNTNNTNNTNNTNNTNNTNNTNNTNNTNNTNNTNNTNNTNNTNNTNNTNNTNNTNNTNNTNNTNNTNNTNNTNNTNNTNNTNNTNNTNNTNNTNNTNNTNNTNNTNNTNNTNNTNNTNNTNNTNNTNNTNNTNNTNNTNNTNNTNNTNNTNNT

SEQ ID NO: 139 - protein, 633 aa, Artificial Sequence
  Description of Artificial Sequence: Synthetic peptide
NNTNNTNNTNNTNNTNNTNNTNNTNNTNNTNNTNNTNNTNNTNNTNNTNNTNNTNNTNNTNNTNNTNNTNNTNNTNNTNNTNNTNNTNNTNNTNNTNNTNNTNNTNNTNNTNNTNNTNNTNNTNNTNNTNNTNNTNNTNNTNNTNNTNNTNNTNNTNNTNNTNNTNNTNNTNNTNNTNNTNNTNNTNNTNNTNNTNNTNNTNNTNNTNNTNNTNNTNNTNNTNNTNNTNNTNNTNNTNNTNNTNNTNNTNNTNNTNNTNNTNNTNNTNNTNNTNNTNNTNNTNNTNNTNNTNNTNNTNNTNNTNNTNNTNNTNNTNNTNNTNNTNNTNNTNNTNNTNNTNNTNNTNNTNNTNNTNNTNNTNNTNNTNNTNNTNNTNNTNNTNNTNNTNNTNNTNNTNNTNNTNNTNNTNNTNNTNNTNNTNNTNNTNNTNNTNNTNNTNNTNNTNNTNNTNNTNNTNNTNNTNNTNNTNNTNNTNNTNNTNNTNNTNNTNNTNNTNNTNNTNNTNNTNNTNNTNNTNNTNNTNNTNNTNNTNNTNNTNNTNNTNNTNNTNNTNNTNNTNNTNNTNNTNNTNNTNNTNNTNNTNNTNNTNNTNNTNNTNNTNNTNNTNNTNNTNNTNNTNNTNNTNNTNNTNNT

SEQ ID NO: 140 - protein, 636 aa, Artificial Sequence
  Description of Artificial Sequence: Synthetic peptide
NNTNNTNNTNNTNNTNNTNNTNNTNNTNNTNNTNNTNNTNNTNNTNNTNNTNNTNNTNNTNNTNNTNNTNNTNNTNNTNNTNNTNNTNNTNNTNNTNNTNNTNNTNNTNNTNNTNNTNNTNNTNNTNNTNNTNNTNNTNNTNNTNNTNNTNNTNNTNNTNNTNNTNNTNNTNNTNNTNNTNNTNNTNNTNNTNNTNNTNNTNNTNNTNNTNNTNNTNNTNNTNNTNNTNNTNNTNNTNNTNNTNNTNNTNNTNNTNNTNNTNNTNNTNNTNNTNNTNNTNNTNNTNNTNNTNNTNNTNNTNNTNNTNNTNNTNNTNNTNNTNNTNNTNNTNNTNNTNNTNNTNNTNNTNNTNNTNNTNNTNNTNNTNNTNNTNNTNNTNNTNNTNNTNNTNNTNNTNNTNNTNNTNNTNNTNNTNNTNNTNNTNNTNNTNNTNNTNNTNNTNNTNNTNNTNNTNNTNNTNNTNNTNNTNNTNNTNNTNNTNNTNNTNNTNNTNNTNNTNNTNNTNNTNNTNNTNNTNNTNNTNNTNNTNNTNNTNNTNNTNNTNNTNNTNNTNNTNNTNNTNNTNNTNNTNNTNNTNNTNNTNNTNNTNNTNNTNNTNNTNNTNNTNNTNNTNNTNNTNNTNNTNNTNNTNNTNNT

SEQ ID NO: 141 - protein, 639 aa, Artificial Sequence
  Description of Artificial Sequence: Synthetic peptide
NNTNNTNNTNNTNNTNNTNNTNNTNNTNNTNNTNNTNNTNNTNNTNNTNNTNNTNNTNNTNNTNNTNNTNNTNNTNNTNNTNNTNNTNNTNNTNNTNNTNNTNNTNNTNNTNNTNNTNNTNNTNNTNNTNNTNNTNNTNNTNNTNNTNNTNNTNNTNNTNNTNNTNNTNNTNNTNNTNNTNNTNNTNNTNNTNNTNNTNNTNNTNNTNNTNNTNNTNNTNNTNNTNNTNNTNNTNNTNNTNNTNNTNNTNNTNNTNNTNNTNNTNNTNNTNNTNNTNNTNNTNNTNNTNNTNNTNNTNNTNNTNNTNNTNNTNNTNNTNNTNNTNNTNNTNNTNNTNNTNNTNNTNNTNNTNNTNNTNNTNNTNNTNNTNNTNNTNNTNNTNNTNNTNNTNNTNNTNNTNNTNNTNNTNNTNNTNNTNNTNNTNNTNNTNNTNNTNNTNNTNNTNNTNNTNNTNNTNNTNNTNNTNNTNNTNNTNNTNNTNNTNNTNNTNNTNNTNNTNNTNNTNNTNNTNNTNNTNNTNNTNNTNNTNNTNNTNNTNNTNNTNNTNNTNNTNNTNNTNNTNNTNNTNNTNNTNNTNNTNNTNNTNNTNNTNNTNNTNNTNNTNNTNNTNNTNNTNNTNNTNNTNNTNNTNNTNNTNNT

SEQ ID NO: 142 - protein, 642 aa, Artificial Sequence
  Description of Artificial Sequence: Synthetic peptide
NNTNNTNNTNNTNNTNNTNNTNNTNNTNNTNNTNNTNNTNNTNNTNNTNNTNNTNNTNNTNNTNNTNNTNNTNNTNNTNNTNNTNNTNNTNNTNNTNNTNNTNNTNNTNNTNNTNNTNNTNNTNNTNNTNNTNNTNNTNNTNNTNNTNNTNNTNNTNNTNNTNNTNNTNNTNNTNNTNNTNNTNNTNNTNNTNNTNNTNNTNNTNNTNNTNNTNNTNNTNNTNNTNNTNNTNNTNNTNNTNNTNNTNNTNNTNNTNNTNNTNNTNNTNNTNNTNNTNNTNNTNNTNNTNNTNNTNNTNNTNNTNNTNNTNNTNNTNNTNNTNNTNNTNNTNNTNNTNNTNNTNNTNNTNNTNNTNNTNNTNNTNNTNNTNNTNNTNNTNNTNNTNNTNNTNNTNNTNNTNNTNNTNNTNNTNNTNNTNNTNNTNNTNNTNNTNNTNNTNNTNNTNNTNNTNNTNNTNNTNNTNNTNNTNNTNNTNNTNNTNNTNNTNNTNNTNNTNNTNNTNNTNNTNNTNNTNNTNNTNNTNNTNNTNNTNNTNNTNNTNNTNNTNNTNNTNNTNNTNNTNNTNNTNNTNNTNNTNNTNNTNNTNNTNNTNNTNNTNNTNNTNNTNNTNNTNNTNNTNNTNNTNNTNNTNNTNNTNNTNNT

SEQ ID NO: 143 - protein, 645 aa, Artificial Sequence
  Description of Artificial Sequence: Synthetic peptide
NNTNNTNNTNNTNNTNNTNNTNNTNNTNNTNNTNNTNNTNNTNNTNNTNNTNNTNNTNNTNNTNNTNNTNNTNNTNNTNNTNNTNNTNNTNNTNNTNNTNNTNNTNNTNNTNNTNNTNNTNNTNNTNNTNNTNNTNNTNNTNNTNNTNNTNNTNNTNNTNNTNNTNNTNNTNNTNNTNNTNNTNNTNNTNNTNNTNNTNNTNNTNNTNNTNNTNNTNNTNNTNNTNNTNNTNNTNNTNNTNNTNNTNNTNNTNNTNNTNNTNNTNNTNNTNNTNNTNNTNNTNNTNNTNNTNNTNNTNNTNNTNNTNNTNNTNNTNNTNNTNNTNNTNNTNNTNNTNNTNNTNNTNNTNNTNNTNNTNNTNNTNNTNNTNNTNNTNNTNNTNNTNNTNNTNNTNNTNNTNNTNNTNNTNNTNNTNNTNNTNNTNNTNNTNNTNNTNNTNNTNNTNNTNNTNNTNNTNNTNNTNNTNNTNNTNNTNNTNNTNNTNNTNNTNNTNNTNNTNNTNNTNNTNNTNNTNNTNNTNNTNNTNNTNNTNNTNNTNNTNNTNNTNNTNNTNNTNNTNNTNNTNNTNNTNNTNNTNNTNNTNNTNNTNNTNNTNNTNNTNNTNNTNNTNNTNNTNNTNNTNNTNNTNNTNNTNNTNNTNNTNNT

SEQ ID NO: 144 - protein, 648 aa, Artificial Sequence
  Description of Artificial Sequence: Synthetic peptide
NNTNNTNNTNNTNNTNNTNNTNNTNNTNNTNNTNNTNNTNNTNNTNNTNNTNNTNNTNNTNNTNNTNNTNNTNNTNNTNNTNNTNNTNNTNNTNNTNNTNNTNNTNNTNNTNNTNNTNNTNNTNNTNNTNNTNNTNNTNNTNNTNNTNNTNNTNNTNNTNNTNNTNNTNNTNNTNNTNNTNNTNNTNNTNNTNNTNNTNNTNNTNNTNNTNNTNNTNNTNNTNNTNNTNNTNNTNNTNNTNNTNNTNNTNNTNNTNNTNNTNNTNNTNNTNNTNNTNNTNNTNNTNNTNNTNNTNNTNNTNNTNNTNNTNNTNNTNNTNNTNNTNNTNNTNNTNNTNNTNNTNNTNNTNNTNNTNNTNNTNNTNNTNNTNNTNNTNNTNNTNNTNNTNNTNNTNNTNNTNNTNNTNNTNNTNNTNNTNNTNNTNNTNNTNNTNNTNNTNNTNNTNNTNNTNNTNNTNNTNNTNNTNNTNNTNNTNNTNNTNNTNNTNNTNNTNNTNNTNNTNNTNNTNNTNNTNNTNNTNNTNNTNNTNNTNNTNNTNNTNNTNNTNNTNNTNNTNNTNNTNNTNNTNNTNNTNNTNNTNNTNNTNNTNNTNNTNNTNNTNNTNNTNNTNNTNNTNNTNNTNNTNNTNNTNNTNNTNNTNNTNNTNNT

SEQ ID NO: 145 - protein, 651 aa, Artificial Sequence
  Description of Artificial Sequence: Synthetic peptide
NNTNNTNNTNNTNNTNNTNNTNNTNNTNNTNNTNNTNNTNNTNNTNNTNNTNNTNNTNNTNNTNNTNNTNNTNNTNNTNNTNNTNNTNNTNNTNNTNNTNNTNNTNNTNNTNNTNNTNNTNNTNNTNNTNNTNNTNNTNNTNNTNNTNNTNNTNNTNNTNNTNNTNNTNNTNNTNNTNNTNNTNNTNNTNNTNNTNNTNNTNNTNNTNNTNNTNNTNNTNNTNNTNNTNNTNNTNNTNNTNNTNNTNNTNNTNNTNNTNNTNNTNNTNNTNNTNNTNNTNNTNNTNNTNNTNNTNNTNNTNNTNNTNNTNNTNNTNNTNNTNNTNNTNNTNNTNNTNNTNNTNNTNNTNNTNNTNNTNNTNNTNNTNNTNNTNNTNNTNNTNNTNNTNNTNNTNNTNNTNNTNNTNNTNNTNNTNNTNNTNNTNNTNNTNNTNNTNNTNNTNNTNNTNNTNNTNNTNNTNNTNNTNNTNNTNNTNNTNNTNNTNNTNNTNNTNNTNNTNNTNNTNNTNNTNNTNNTNNTNNTNNTNNTNNTNNTNNTNNTNNTNNTNNTNNTNNTNNTNNTNNTNNTNNTNNTNNTNNTNNTNNTNNTNNTNNTNNTNNTNNTNNTNNTNNTNNTNNTNNTNNTNNTNNTNNTNNTNNTNNTNNTNNTNNT

SEQ ID NO: 146 - protein, 654 aa, Artificial Sequence
  Description of Artificial Sequence: Synthetic peptide
NNTNNTNNTNNTNNTNNTNNTNNTNNTNNTNNTNNTNNTNNTNNTNNTNNTNNTNNTNNTNNTNNTNNTNNTNNTNNTNNTNNTNNTNNTNNTNNTNNTNNTNNTNNTNNTNNTNNTNNTNNTNNTNNTNNTNNTNNTNNTNNTNNTNNTNNTNNTNNTNNTNNTNNTNNTNNTNNTNNTNNTNNTNNTNNTNNTNNTNNTNNTNNTNNTNNTNNTNNTNNTNNTNNTNNTNNTNNTNNTNNTNNTNNTNNTNNTNNTNNTNNTNNTNNTNNTNNTNNTNNTNNTNNTNNTNNTNNTNNTNNTNNTNNTNNTNNTNNTNNTNNTNNTNNTNNTNNTNNTNNTNNTNNTNNTNNTNNTNNTNNTNNTNNTNNTNNTNNTNNTNNTNNTNNTNNTNNTNNTNNTNNTNNTNNTNNTNNTNNTNNTNNTNNTNNTNNTNNTNNTNNTNNTNNTNNTNNTNNTNNTNNTNNTNNTNNTNNTNNTNNTNNTNNTNNTNNTNNTNNTNNTNNTNNTNNTNNTNNTNNTNNTNNTNNTNNTNNTNNTNNTNNTNNTNNTNNTNNTNNTNNTNNTNNTNNTNNTNNTNNTNNTNNTNNTNNTNNTNNTNNTNNTNNTNNTNNTNNTNNTNNTNNTNNTNNTNNTNNTNNTNNTNNTNNTNNT

SEQ ID NO: 147 - protein, 657 aa, Artificial Sequence
  Description of Artificial Sequence: Synthetic peptide
NNTNNTNNTNNTNNTNNTNNTNNTNNTNNTNNTNNTNNTNNTNNTNNTNNTNNTNNTNNTNNTNNTNNTNNTNNTNNTNNTNNTNNTNNTNNTNNTNNTNNTNNTNNTNNTNNTNNTNNTNNTNNTNNTNNTNNTNNTNNTNNTNNTNNTNNTNNTNNTNNTNNTNNTNNTNNTNNTNNTNNTNNTNNTNNTNNTNNTNNTNNTNNTNNTNNTNNTNNTNNTNNTNNTNNTNNTNNTNNTNNTNNTNNTNNTNNTNNTNNTNNTNNTNNTNNTNNTNNTNNTNNTNNTNNTNNTNNTNNTNNTNNTNNTNNTNNTNNTNNTNNTNNTNNTNNTNNTNNTNNTNNTNNTNNTNNTNNTNNTNNTNNTNNTNNTNNTNNTNNTNNTNNTNNTNNTNNTNNTNNTNNTNNTNNTNNTNNTNNTNNTNNTNNTNNTNNTNNTNNTNNTNNTNNTNNTNNTNNTNNTNNTNNTNNTNNTNNTNNTNNTNNTNNTNNTNNTNNTNNTNNTNNTNNTNNTNNTNNTNNTNNTNNTNNTNNTNNTNNTNNTNNTNNTNNTNNTNNTNNTNNTNNTNNTNNTNNTNNTNNTNNTNNTNNTNNTNNTNNTNNTNNTNNTNNTNNTNNTNNTNNTNNTNNTNNTNNTNNTNNTNNTNNTNNTNNTNNT

SEQ ID NO: 148 - protein, 660 aa, Artificial Sequence
  Description of Artificial Sequence: Synthetic peptide
NNTNNTNNTNNTNNTNNTNNTNNTNNTNNTNNTNNTNNTNNTNNTNNTNNTNNTNNTNNTNNTNNTNNTNNTNNTNNTNNTNNTNNTNNTNNTNNTNNTNNTNNTNNTNNTNNTNNTNNTNNTNNTNNTNNTNNTNNTNNTNNTNNTNNTNNTNNTNNTNNTNNTNNTNNTNNTNNTNNTNNTNNTNNTNNTNNTNNTNNTNNTNNTNNTNNTNNTNNTNNTNNTNNTNNTNNTNNTNNTNNTNNTNNTNNTNNTNNTNNTNNTNNTNNTNNTNNTNNTNNTNNTNNTNNTNNTNNTNNTNNTNNTNNTNNTNNTNNTNNTNNTNNTNNTNNTNNTNNTNNTNNTNNTNNTNNTNNTNNTNNTNNTNNTNNTNNTNNTNNTNNTNNTNNTNNTNNTNNTNNTNNTNNTNNTNNTNNTNNTNNTNNTNNTNNTNNTNNTNNTNNTNNTNNTNNTNNTNNTNNTNNTNNTNNTNNTNNTNNTNNTNNTNNTNNTNNTNNTNNTNNTNNTNNTNNTNNTNNTNNTNNTNNTNNTNNTNNTNNTNNTNNTNNTNNTNNTNNTNNTNNTNNTNNTNNTNNTNNTNNTNNTNNTNNTNNTNNTNNTNNTNNTNNTNNTNNTNNTNNTNNTNNTNNTNNTNNTNNTNNTNNTNNTNNTNNTNNTNNT

SEQ ID NO: 149 - protein, 663 aa, Artificial Sequence
  Description of Artificial Sequence: Synthetic peptide
NNTNNTNNTNNTNNTNNTNNTNNTNNTNNTNNTNNTNNTNNTNNTNNTNNTNNTNNTNNTNNTNNTNNTNNTNNTNNTNNTNNTNNTNNTNNTNNTNNTNNTNNTNNTNNTNNTNNTNNTNNTNNTNNTNNTNNTNNTNNTNNTNNTNNTNNTNNTNNTNNTNNTNNTNNTNNTNNTNNTNNTNNTNNTNNTNNTNNTNNTNNTNNTNNTNNTNNTNNTNNTNNTNNTNNTNNTNNTNNTNNTNNTNNTNNTNNTNNTNNTNNTNNTNNTNNTNNTNNTNNTNNTNNTNNTNNTNNTNNTNNTNNTNNTNNTNNTNNTNNTNNTNNTNNTNNTNNTNNTNNTNNTNNTNNTNNTNNTNNTNNTNNTNNTNNTNNTNNTNNTNNTNNTNNTNNTNNTNNTNNTNNTNNTNNTNNTNNTNNTNNTNNTNNTNNTNNTNNTNNTNNTNNTNNTNNTNNTNNTNNTNNTNNTNNTNNTNNTNNTNNTNNTNNTNNTNNTNNTNNTNNTNNTNNTNNTNNTNNTNNTNNTNNTNNTNNTNNTNNTNNTNNTNNTNNTNNTNNTNNTNNTNNTNNTNNTNNTNNTNNTNNTNNTNNTNNTNNTNNTNNTNNTNNTNNTNNTNNTNNTNNTNNTNNTNNTNNTNNTNNTNNTNNTNNTNNTNNTNNTNNT

SEQ ID NO: 150 - protein, 666 aa, Artificial Sequence
  Description of Artificial Sequence: Synthetic peptide
NNTNNTNNTNNTNNTNNTNNTNNTNNTNNTNNTNNTNNTNNTNNTNNTNNTNNTNNTNNTNNTNNTNNTNNTNNTNNTNNTNNTNNTNNTNNTNNTNNTNNTNNTNNTNNTNNTNNTNNTNNTNNTNNTNNTNNTNNTNNTNNTNNTNNTNNTNNTNNTNNTNNTNNTNNTNNTNNTNNTNNTNNTNNTNNTNNTNNTNNTNNTNNTNNTNNTNNTNNTNNTNNTNNTNNTNNTNNTNNTNNTNNTNNTNNTNNTNNTNNTNNTNNTNNTNNTNNTNNTNNTNNTNNTNNTNNTNNTNNTNNTNNTNNTNNTNNTNNTNNTNNTNNTNNTNNTNNTNNTNNTNNTNNTNNTNNTNNTNNTNNTNNTNNTNNTNNTNNTNNTNNTNNTNNTNNTNNTNNTNNTNNTNNTNNTNNTNNTNNTNNTNNTNNTNNTNNTNNTNNTNNTNNTNNTNNTNNTNNTNNTNNTNNTNNTNNTNNTNNTNNTNNTNNTNNTNNTNNTNNTNNTNNTNNTNNTNNTNNTNNTNNTNNTNNTNNTNNTNNTNNTNNTNNTNNTNNTNNTNNTNNTNNTNNTNNTNNTNNTNNTNNTNNTNNTNNTNNTNNTNNTNNTNNTNNTNNTNNTNNTNNTNNTNNTNNTNNTNNTNNTNNTNNTNNTNNTNNTNNTNNTNNT

SEQ ID NO: 151 - protein, 669 aa, Artificial Sequence
  Description of Artificial Sequence: Synthetic peptide
NNTNNTNNTNNTNNTNNTNNTNNTNNTNNTNNTNNTNNTNNTNNTNNTNNTNNTNNTNNTNNTNNTNNTNNTNNTNNTNNTNNTNNTNNTNNTNNTNNTNNTNNTNNTNNTNNTNNTNNTNNTNNTNNTNNTNNTNNTNNTNNTNNTNNTNNTNNTNNTNNTNNTNNTNNTNNTNNTNNTNNTNNTNNTNNTNNTNNTNNTNNTNNTNNTNNTNNTNNTNNTNNTNNTNNTNNTNNTNNTNNTNNTNNTNNTNNTNNTNNTNNTNNTNNTNNTNNTNNTNNTNNTNNTNNTNNTNNTNNTNNTNNTNNTNNTNNTNNTNNTNNTNNTNNTNNTNNTNNTNNTNNTNNTNNTNNTNNTNNTNNTNNTNNTNNTNNTNNTNNTNNTNNTNNTNNTNNTNNTNNTNNTNNTNNTNNTNNTNNTNNTNNTNNTNNTNNTNNTNNTNNTNNTNNTNNTNNTNNTNNTNNTNNTNNTNNTNNTNNTNNTNNTNNTNNTNNTNNTNNTNNTNNTNNTNNTNNTNNTNNTNNTNNTNNTNNTNNTNNTNNTNNTNNTNNTNNTNNTNNTNNTNNTNNTNNTNNTNNTNNTNNTNNTNNTNNTNNTNNTNNTNNTNNTNNTNNTNNTNNTNNTNNTNNTNNTNNTNNTNNTNNTNNTNNTNNTNNTNNTNNTNNTNNT

SEQ ID NO: 152 - protein, 672 aa, Artificial Sequence
  Description of Artificial Sequence: Synthetic peptide
NNTNNTNNTNNTNNTNNTNNTNNTNNTNNTNNTNNTNNTNNTNNTNNTNNTNNTNNTNNTNNTNNTNNTNNTNNTNNTNNTNNTNNTNNTNNTNNTNNTNNTNNTNNTNNTNNTNNTNNTNNTNNTNNTNNTNNTNNTNNTNNTNNTNNTNNTNNTNNTNNTNNTNNTNNTNNTNNTNNTNNTNNTNNTNNTNNTNNTNNTNNTNNTNNTNNTNNTNNTNNTNNTNNTNNTNNTNNTNNTNNTNNTNNTNNTNNTNNTNNTNNTNNTNNTNNTNNTNNTNNTNNTNNTNNTNNTNNTNNTNNTNNTNNTNNTNNTNNTNNTNNTNNTNNTNNTNNTNNTNNTNNTNNTNNTNNTNNTNNTNNTNNTNNTNNTNNTNNTNNTNNTNNTNNTNNTNNTNNTNNTNNTNNTNNTNNTNNTNNTNNTNNTNNTNNTNNTNNTNNTNNTNNTNNTNNTNNTNNTNNTNNTNNTNNTNNTNNTNNTNNTNNTNNTNNTNNTNNTNNTNNTNNTNNTNNTNNTNNTNNTNNTNNTNNTNNTNNTNNTNNTNNTNNTNNTNNTNNTNNTNNTNNTNNTNNTNNTNNTNNTNNTNNTNNTNNTNNTNNTNNTNNTNNTNNTNNTNNTNNTNNTNNTNNTNNTNNTNNTNNTNNTNNTNNTNNTNNTNNTNNTNNTNNTNNT

SEQ ID NO: 153 - protein, 675 aa, Artificial Sequence
  Description of Artificial Sequence: Synthetic peptide
NNTNNTNNTNNTNNTNNTNNTNNTNNTNNTNNTNNTNNTNNTNNTNNTNNTNNTNNTNNTNNTNNTNNTNNTNNTNNTNNTNNTNNTNNTNNTNNTNNTNNTNNTNNTNNTNNTNNTNNTNNTNNTNNTNNTNNTNNTNNTNNTNNTNNTNNTNNTNNTNNTNNTNNTNNTNNTNNTNNTNNTNNTNNTNNTNNTNNTNNTNNTNNTNNTNNTNNTNNTNNTNNTNNTNNTNNTNNTNNTNNTNNTNNTNNTNNTNNTNNTNNTNNTNNTNNTNNTNNTNNTNNTNNTNNTNNTNNTNNTNNTNNTNNTNNTNNTNNTNNTNNTNNTNNTNNTNNTNNTNNTNNTNNTNNTNNTNNTNNTNNTNNTNNTNNTNNTNNTNNTNNTNNTNNTNNTNNTNNTNNTNNTNNTNNTNNTNNTNNTNNTNNTNNTNNTNNTNNTNNTNNTNNTNNTNNTNNTNNTNNTNNTNNTNNTNNTNNTNNTNNTNNTNNTNNTNNTNNTNNTNNTNNTNNTNNTNNTNNTNNTNNTNNTNNTNNTNNTNNTNNTNNTNNTNNTNNTNNTNNTNNTNNTNNTNNTNNTNNTNNTNNTNNTNNTNNTNNTNNTNNTNNTNNTNNTNNTNNTNNTNNTNNTNNTNNTNNTNNTNNTNNTNNTNNTNNTNNTNNTNNTNNTNNTNNTNNT

SEQ ID NO: 154 - protein, 18 aa, Artificial Sequence
  Description of Artificial Sequence: Synthetic peptide
MFLQNLFLGFLAVVCANA

SEQ ID NO: 155 - DNA, 37 bp, Artificial Sequence
  Description of Artificial Sequence: Synthetic oligonucleotide
ggccgccatatgttcttgcaaaatttattccttggct

SEQ ID NO: 156 - DNA, 39 bp, Artificial Sequence
  Description of Artificial Sequence: Synthetic oligonucleotide
ccaaaaagccaaggaataaattttgcaagaacatatggc

SEQ ID NO: 157 - DNA, 37 bp, Artificial Sequence
  Description of Artificial Sequence: Synthetic oligonucleotide
ttttggccgttgtttgcgcaaacgcgtcccgcaggtg

SEQ ID NO: 158 - DNA, 35 bp, Artificial Sequence
  Description of Artificial Sequence: Synthetic oligonucleotide
gatccacctgcgggacgcgtttgcgcaaacaacgg

SEQ ID NO: 159 - DNA, 39 bp, Artificial Sequence
  Description of Artificial Sequence: Synthetic oligonucleotide
cgatcgacctgcaagtcgcgactccgctgggtccagcta

SEQ ID NO: 160 - DNA, 39 bp, Artificial Sequence
  Description of Artificial Sequence: Synthetic oligonucleotide
cgggatccgaagacgtgttgttaggctgggcaaggtggc

SEQ ID NO: 161 - DNA, 27 bp, Artificial Sequence
  Description of Artificial Sequence: Synthetic oligonucleotide
caacaccaacaataccaacaatacaaa

SEQ ID NO: 162 - DNA, 27 bp, Artificial Sequence
  Description of Artificial Sequence: Synthetic oligonucleotide
gttgtttgtattgttggtattgttggt

SEQ ID NO: 163 - DNA, 13 bp, Artificial Sequence
  Description of Artificial Sequence: Synthetic oligonucleotide
caactagtcttcg

SEQ ID NO: 164 - DNA, 13 bp, Artificial Sequence
  Description of Artificial Sequence: Synthetic oligonucleotide
gatccgaagacta

SEQ ID NO: 165 - protein, 9 aa, Artificial Sequence
  Description of Artificial Sequence: Synthetic peptide
NTNNTNNTN

SEQ ID NO: 166 - DNA, 27 bp, Artificial Sequence
  Description of Artificial Sequence: Synthetic oligonucleotide
caacaccaacaataccaacaatacaaa

SEQ ID NO: 167 - DNA, 27 bp, Artificial Sequence
  Description of Artificial Sequence: Synthetic oligonucleotide
gttgtttgtattgttggtattgttggt

SEQ ID NO: 168 - DNA, 13 bp, Artificial Sequence
  Description of Artificial Sequence: Synthetic oligonucleotide
caactagtcttcg

SEQ ID NO: 169 - DNA, 13 bp, Artificial Sequence
  Description of Artificial Sequence: Synthetic oligonucleotide
gatccgaagacta

SEQ ID NO: 170 - DNA, 27 bp, Artificial Sequence
  Description of Artificial Sequence: Synthetic oligonucleotide
caacaccaataataccaacaatacaaa

SEQ ID NO: 171 - DNA, 27 bp, Artificial Sequence
  Description of Artificial Sequence: Synthetic oligonucleotide
gttgtttgtattgttggtattattggt

SEQ ID NO: 172 - DNA, 13 bp, Artificial Sequence
  Description of Artificial Sequence: Synthetic oligonucleotide
caactagtcttcg

SEQ ID NO: 173 - DNA, 13 bp, Artificial Sequence
  Description of Artificial Sequence: Synthetic oligonucleotide
gatccgaagacta

SEQ ID NO: 174 - DNA, 27 bp, Artificial Sequence
  Description of Artificial Sequence: Synthetic oligonucleotide
caacaccaataataccaacaatacaaa

SEQ ID NO: 175 - DNA, 27 bp, Artificial Sequence
  Description of Artificial Sequence: Synthetic oligonucleotide
gttgtttgtattgttggtattattggt

SEQ ID NO: 176 - DNA, 13 bp, Artificial Sequence
  Description of Artificial Sequence: Synthetic oligonucleotide
caactagtcttcg

SEQ ID NO: 177 - DNA, 13 bp, Artificial Sequence
  Description of Artificial Sequence: Synthetic oligonucleotide
gatccgaagacta

SEQ ID NO: 178 - DNA, 29 bp, Artificial Sequence
  Description of Artificial Sequence: Synthetic oligonucleotide
ggctctagatattaatagtaatcaattac

SEQ ID NO: 179 - DNA, 26 bp, Artificial Sequence
  Description of Artificial Sequence: Synthetic oligonucleotide
cctcacgcatgcaccatggtaatagc

SEQ ID NO: 180 - DNA, 24 bp, Artificial Sequence
  Description of Artificial Sequence: Synthetic oligonucleotide
ggtgcatgcgtgaggctccggtgc

SEQ ID NO: 181 - DNA, 28 bp, Artificial Sequence
  Description of Artificial Sequence: Synthetic oligonucleotide
gtagttttcacggtacctgaaatggaag

SEQ ID NO: 182 - protein, 5 aa, Artificial Sequence
  Description of Artificial Sequence: Synthetic peptide
NNNNT

SEQ ID NO: 183 - protein, 6 aa, Artificial Sequence
  Description of Artificial Sequence: Synthetic peptide
NNNNNT

SEQ ID NO: 184 - protein, 4 aa, Artificial Sequence
  Description of Artificial Sequence: Synthetic peptide
NNNT

SEQ ID NO: 185 - protein, 4 aa, Artificial Sequence
  Description of Artificial Sequence: Synthetic peptide
TNNN

SEQ ID NO: 186 - protein, 4 aa, Artificial Sequence
  Description of Artificial Sequence: Synthetic peptide
NTNN

SEQ ID NO: 187 - protein, 4 aa, Artificial Sequence
  Description of Artificial Sequence: Synthetic peptide
NNTN

SEQ ID NO: 188 - protein, 5 aa, Artificial Sequence
  Description of Artificial Sequence: Synthetic peptide
NNNNT

SEQ ID NO: 189 - protein, 5 aa, Artificial Sequence
  Description of Artificial Sequence: Synthetic peptide
TNNNN

SEQ ID NO: 190 - protein, 5 aa, Artificial Sequence
  Description of Artificial Sequence: Synthetic peptide
NTNNN

SEQ ID NO: 191 - protein, 5 aa, Artificial Sequence
  Description of Artificial Sequence: Synthetic peptide
NNTNN

SEQ ID NO: 192 - protein, 5 aa, Artificial Sequence
  Description of Artificial Sequence: Synthetic peptide
NNNTN

SEQ ID NO: 193 - protein, 5 aa, Artificial Sequence
  Description of Artificial Sequence: Synthetic peptide
NNNTT

SEQ ID NO: 194 - protein, 5 aa, Artificial Sequence
  Description of Artificial Sequence: Synthetic peptide
TTNNN

SEQ ID NO: 195 - protein, 5 aa, Artificial Sequence
  Description of Artificial Sequence: Synthetic peptide
TNTNN

SEQ ID NO: 196 - protein, 5 aa, Artificial Sequence
  Description of Artificial Sequence: Synthetic peptide
TNNTN

SEQ ID NO: 197 - protein, 5 aa, Artificial Sequence
  Description of Artificial Sequence: Synthetic peptide
TNNNT

SEQ ID NO: 198 - protein, 5 aa, Artificial Sequence
  Description of Artificial Sequence: Synthetic peptide
NTTNN

SEQ ID NO: 199 - protein, 5 aa, Artificial Sequence
  Description of Artificial Sequence: Synthetic peptide
NTNTN

SEQ ID NO: 200 - protein, 5 aa, Artificial Sequence
  Description of Artificial Sequence: Synthetic peptide
NTNNT

SEQ ID NO: 201 - protein, 5 aa, Artificial Sequence
  Description of Artificial Sequence: Synthetic peptide
NNTTN

SEQ ID NO: 202 - protein, 5 aa, Artificial Sequence
  Description of Artificial Sequence: Synthetic peptide
NNTNT

SEQ ID NO: 203 - protein, 6 aa, Artificial Sequence
  Description of Artificial Sequence: Synthetic peptide
NNNNNT

SEQ ID NO: 204 - protein, 6 aa, Artificial Sequence
  Description of Artificial Sequence: Synthetic peptide
TNNNNN

SEQ ID NO: 205 - protein, 6 aa, Artificial Sequence
  Description of Artificial Sequence: Synthetic peptide
NTNNNN

SEQ ID NO: 206 - protein, 6 aa, Artificial Sequence
  Description of Artificial Sequence: Synthetic peptide
NNTNNN

SEQ ID NO: 207 - protein, 6 aa, Artificial Sequence
  Description of Artificial Sequence: Synthetic peptide
NNNTNN

SEQ ID NO: 208 - protein, 6 aa, Artificial Sequence
  Description of Artificial Sequence: Synthetic peptide
NNNNTN

SEQ ID NO: 209 - protein, 6 aa, Artificial Sequence
  Description of Artificial Sequence: Synthetic peptide
NNNNTT

SEQ ID NO: 210 - protein, 6 aa, Artificial Sequence
  Description of Artificial Sequence: Synthetic peptide
TTNNNN

SEQ ID NO: 211 - protein, 6 aa, Artificial Sequence
  Description of Artificial Sequence: Synthetic peptide
TNTNNN

SEQ ID NO: 212 - protein, 6 aa, Artificial Sequence
  Description of Artificial Sequence: Synthetic peptide
TNNTNN

SEQ ID NO: 213 - protein, 6 aa, Artificial Sequence
  Description of Artificial Sequence: Synthetic peptide
TNNNTN

SEQ ID NO: 214 - protein, 6 aa, Artificial Sequence
  Description of Artificial Sequence: Synthetic peptide
TNNNNT

SEQ ID NO: 215 - protein, 6 aa, Artificial Sequence
  Description of Artificial Sequence: Synthetic peptide
NTTNNN

SEQ ID NO: 216 - protein, 6 aa, Artificial Sequence
  Description of Artificial Sequence: Synthetic peptide
NTNTNN

SEQ ID NO: 217 - protein, 6 aa, Artificial Sequence
  Description of Artificial Sequence: Synthetic peptide
NTNNTN

SEQ ID NO: 218 - protein, 6 aa, Artificial Sequence
  Description of Artificial Sequence: Synthetic peptide
NTNNNT

SEQ ID NO: 219 - protein, 6 aa, Artificial Sequence
  Description of Artificial Sequence: Synthetic peptide
NNTTNN

SEQ ID NO: 220 - protein, 6 aa, Artificial Sequence
  Description of Artificial Sequence: Synthetic peptide
NNTNTN

SEQ ID NO: 221 - protein, 6 aa, Artificial Sequence
  Description of Artificial Sequence: Synthetic peptide
NNTNNT

SEQ ID NO: 222 - protein, 6 aa, Artificial Sequence
  Description of Artificial Sequence: Synthetic peptide
NNNTTN

SEQ ID NO: 223 - protein, 6 aa, Artificial Sequence
  Description of Artificial Sequence: Synthetic peptide
NNNTNT

SEQ ID NO: 224 - protein, 7 aa, Artificial Sequence
  Description of Artificial Sequence: Synthetic peptide
NNNNTTT

SEQ ID NO: 225 - protein, 7 aa, Artificial Sequence
  Description of Artificial Sequence: Synthetic peptide
TTTNNNN

SEQ ID NO: 226 - protein, 7 aa, Artificial Sequence
  Description of Artificial Sequence: Synthetic peptide
TNTTNNN

SEQ ID NO: 227 - protein, 7 aa, Artificial Sequence
  Description of Artificial Sequence: Synthetic peptide
TNTNTNN

SEQ ID NO: 228 - protein, 7 aa, Artificial Sequence
  Description of Artificial Sequence: Synthetic peptide
TNTNNTN

SEQ ID NO: 229 - protein, 7 aa, Artificial Sequence
  Description of Artificial Sequence: Synthetic peptide
TNTNNNT

SEQ ID NO: 230 - protein, 7 aa, Artificial Sequence
  Description of Artificial Sequence: Synthetic peptide
TNNTTNN

SEQ ID NO: 231 - protein, 7 aa, Artificial Sequence
  Description of Artificial Sequence: Synthetic peptide
TNNTNTN

SEQ ID NO: 232 - protein, 7 aa, Artificial Sequence
  Description of Artificial Sequence: Synthetic peptide
TNNTNNT

SEQ ID NO: 233 - protein, 7 aa, Artificial Sequence
  Description of Artificial Sequence: Synthetic peptide
TNNNTNT

SEQ ID NO: 234 - protein, 7 aa, Artificial Sequence
  Description of Artificial Sequence: Synthetic peptide
TNNNTTN

SEQ ID NO: 235 - protein, 7 aa, Artificial Sequence
  Description of Artificial Sequence: Synthetic peptide
TNNNNTT

SEQ ID NO: 236 - protein, 7 aa, Artificial Sequence
  Description of Artificial Sequence: Synthetic peptide
TTNTNNN

SEQ ID NO: 237 - protein, 7 aa, Artificial Sequence
  Description of Artificial Sequence: Synthetic peptide
TTNNTNN

SEQ ID NO: 238 - protein, 7 aa, Artificial Sequence
  Description of Artificial Sequence: Synthetic peptide
TTNNNTN

SEQ ID NO: 239 - protein, 7 aa, Artificial Sequence
  Description of Artificial Sequence: Synthetic peptide
TTNNNNT

SEQ ID NO: 240 - protein, 7 aa, Artificial Sequence
  Description of Artificial Sequence: Synthetic peptide
NTTTNNN

SEQ ID NO: 241 - protein, 7 aa, Artificial Sequence
  Description of Artificial Sequence: Synthetic peptide
NTTNTNN

SEQ ID NO: 242 - protein, 7 aa, Artificial Sequence
  Description of Artificial Sequence: Synthetic peptide
NTTNNTN

SEQ ID NO: 243 - protein, 7 aa, Artificial Sequence
  Description of Artificial Sequence: Synthetic peptide
NTTNNNT

SEQ ID NO: 244 - protein, 7 aa, Artificial Sequence
  Description of Artificial Sequence: Synthetic peptide
NTNTTNN

SEQ ID NO: 245 - protein, 7 aa, Artificial Sequence
  Description of Artificial Sequence: Synthetic peptide
NTNNTTN

SEQ ID NO: 246 - protein, 7 aa, Artificial Sequence
  Description of Artificial Sequence: Synthetic peptide
NTNNNTT

SEQ ID NO: 247 - protein, 7 aa, Artificial Sequence
  Description of Artificial Sequence: Synthetic peptide
NTNTNTN

SEQ ID NO: 248 - protein, 7 aa, Artificial Sequence
  Description of Artificial Sequence: Synthetic peptide
NTNTNNT

SEQ ID NO: 249 - protein, 7 aa, Artificial Sequence
  Description of Artificial Sequence: Synthetic peptide
NTNNTNT

SEQ ID NO: 250 - protein, 7 aa, Artificial Sequence
  Description of Artificial Sequence: Synthetic peptide
NNTTTNN

SEQ ID NO: 251 - protein, 7 aa, Artificial Sequence
  Description of Artificial Sequence: Synthetic peptide
NNTTNTN

SEQ ID NO: 252 - protein, 7 aa, Artificial Sequence
  Description of Artificial Sequence: Synthetic peptide
NNTTNNT

SEQ ID NO: 253 - protein, 7 aa, Artificial Sequence
  Description of Artificial Sequence: Synthetic peptide
NNTNTTN

SEQ ID NO: 254 - protein, 7 aa, Artificial Sequence
  Description of Artificial Sequence: Synthetic peptide
NNTNTNT

SEQ ID NO: 255 - protein, 7 aa, Artificial Sequence
  Description of Artificial Sequence: Synthetic peptide
NNTNNTT

SEQ ID NO: 256 - protein, 7 aa, Artificial Sequence
  Description of Artificial Sequence: Synthetic peptide
NNNTTTN

SEQ ID NO: 257 - protein, 7 aa, Artificial Sequence
  Description of Artificial Sequence: Synthetic peptide
NNNTTNT

SEQ ID NO: 258 - protein, 7 aa, Artificial Sequence
  Description of Artificial Sequence: Synthetic peptide
NNNTNTT

SEQ ID NO: 259 - protein, 7 aa, Artificial Sequence
  Description of Artificial Sequence: Synthetic peptide
NNNNNTT

SEQ ID NO: 260 - protein, 7 aa, Artificial Sequence
  Description of Artificial Sequence: Synthetic peptide
TTNNNNN

SEQ ID NO: 261 - protein, 7 aa, Artificial Sequence
  Description of Artificial Sequence: Synthetic peptide
TNTNNNN

SEQ ID NO: 262 - protein, 7 aa, Artificial Sequence
  Description of Artificial Sequence: Synthetic peptide
TNNTNNN

SEQ ID NO: 263 - protein, 7 aa, Artificial Sequence
  Description of Artificial Sequence: Synthetic peptide
TNNNTNN

SEQ ID NO: 264 - protein, 7 aa, Artificial Sequence
  Description of Artificial Sequence: Synthetic peptide
TNNNNTN

SEQ ID NO: 265 - protein, 7 aa, Artificial Sequence
  Description of Artificial Sequence: Synthetic peptide
TNNNNNT

SEQ ID NO: 266 - protein, 7 aa, Artificial Sequence
  Description of Artificial Sequence: Synthetic peptide
NTTNNNN

SEQ ID NO: 267 - protein, 7 aa, Artificial Sequence
  Description of Artificial Sequence: Synthetic peptide
NTNTNNN

SEQ ID NO: 268 - protein, 7 aa, Artificial Sequence
  Description of Artificial Sequence: Synthetic peptide
NTNNTNN

SEQ ID NO: 269 - protein, 7 aa, Artificial Sequence
  Description of Artificial Sequence: Synthetic peptide
NTNNNTN

SEQ ID NO: 270 - protein, 7 aa, Artificial Sequence
  Description of Artificial Sequence: Synthetic peptide
NTNNNNT

SEQ ID NO: 271 - protein, 7 aa, Artificial Sequence
  Description of Artificial Sequence: Synthetic peptide
NNTTNNN

SEQ ID NO: 272 - protein, 7 aa, Artificial Sequence
  Description of Artificial Sequence: Synthetic peptide
NNTNTNN

SEQ ID NO: 273 - protein, 7 aa, Artificial Sequence
  Description of Artificial Sequence: Synthetic peptide
NNTNNTN

SEQ ID NO: 274 - protein, 7 aa, Artificial Sequence
  Description of Artificial Sequence: Synthetic peptide
NNTNNNT

SEQ ID NO: 275 - protein, 7 aa, Artificial Sequence
  Description of Artificial Sequence: Synthetic peptide
NNNTTNN

SEQ ID NO: 276 - protein, 7 aa, Artificial Sequence
  Description of Artificial Sequence: Synthetic peptide
NNNTNTN

SEQ ID NO: 277 - protein, 7 aa, Artificial Sequence
  Description of Artificial Sequence: Synthetic peptide
NNNTNNT

SEQ ID NO: 278 - protein, 7 aa, Artificial Sequence
  Description of Artificial Sequence: Synthetic peptide
NNNNTTN

SEQ ID NO: 279 - protein, 7 aa, Artificial Sequence
  Description of Artificial Sequence: Synthetic peptide
NNNNTNT

SEQ ID NO: 280 - protein, 7 aa, Artificial Sequence
  Description of Artificial Sequence: Synthetic peptide
NNNNNNT

SEQ ID NO: 281 - protein, 7 aa, Artificial Sequence
  Description of Artificial Sequence: Synthetic peptide
TNNNNNN

SEQ ID NO: 282 - protein, 7 aa, Artificial Sequence
  Description of Artificial Sequence: Synthetic peptide
NTNNNNN

SEQ ID NO: 283 - protein, 7 aa, Artificial Sequence
  Description of Artificial Sequence: Synthetic peptide
NNTNNNN

SEQ ID NO: 284 - protein, 7 aa, Artificial Sequence
  Description of Artificial Sequence: Synthetic peptide
NNNTNNN

SEQ ID NO: 285 - protein, 7 aa, Artificial Sequence
  Description of Artificial Sequence: Synthetic peptide
NNNNTNN

SEQ ID NO: 286 - protein, 7 aa, Artificial Sequence
  Description of Artificial Sequence: Synthetic peptide
NNNNNTN

SEQ ID NO: 287 - protein, 4 aa, Artificial Sequence
  Description of Artificial Sequence: Synthetic peptide
NNNA

SEQ ID NO: 288 - protein, 4 aa, Artificial Sequence
  Description of Artificial Sequence: Synthetic peptide
ANNN

SEQ ID NO: 289 - protein, 4 aa, Artificial Sequence
  Description of Artificial Sequence: Synthetic peptide
NANN

SEQ ID NO: 290 - protein, 4 aa, Artificial Sequence
  Description of Artificial Sequence: Synthetic peptide
NNAN

SEQ ID NO: 291 - protein, 5 aa, Artificial Sequence
  Description of Artificial Sequence: Synthetic peptide
NNNNA

SEQ ID NO: 292 - protein, 5 aa, Artificial Sequence
  Description of Artificial Sequence: Synthetic peptide
ANNNN

SEQ ID NO: 293 - protein, 5 aa, Artificial Sequence
  Description of Artificial Sequence: Synthetic peptide
NANNN

SEQ ID NO: 294 - protein, 5 aa, Artificial Sequence
  Description of Artificial Sequence: Synthetic peptide
NNANN

SEQ ID NO: 295 - protein, 5 aa, Artificial Sequence
  Description of Artificial Sequence: Synthetic peptide
NNNAN

SEQ ID NO: 296 - protein, 5 aa, Artificial Sequence
  Description of Artificial Sequence: Synthetic peptide
NNNAA

SEQ ID NO: 297 - protein, 5 aa, Artificial Sequence
  Description of Artificial Sequence: Synthetic peptide
AANNN

SEQ ID NO: 298 - protein, 5 aa, Artificial Sequence
  Description of Artificial Sequence: Synthetic peptide
ANANN

SEQ ID NO: 299 - protein, 5 aa, Artificial Sequence
  Description of Artificial Sequence: Synthetic peptide
ANNAN

SEQ ID NO: 300 - protein, 5 aa, Artificial Sequence
  Description of Artificial Sequence: Synthetic peptide
ANNNA

SEQ ID NO: 301 - protein, 5 aa, Artificial Sequence
  Description of Artificial Sequence: Synthetic peptide
NAANN

SEQ ID NO: 302 - protein, 5 aa, Artificial Sequence
  Description of Artificial Sequence: Synthetic peptide
NANAN

SEQ ID NO: 303 - protein, 5 aa, Artificial Sequence
  Description of Artificial Sequence: Synthetic peptide
NANNA

SEQ ID NO: 304 - protein, 5 aa, Artificial Sequence
  Description of Artificial Sequence: Synthetic peptide
NNAAN

SEQ ID NO: 305 - protein, 5 aa, Artificial Sequence
  Description of Artificial Sequence: Synthetic peptide
NNANA

SEQ ID NO: 306 - protein, 6 aa, Artificial Sequence
  Description of Artificial Sequence: Synthetic peptide
NNNNNA

SEQ ID NO: 307 - protein, 6 aa, Artificial Sequence
  Description of Artificial Sequence: Synthetic peptide
ANNNNN

SEQ ID NO: 308 - protein, 6 aa, Artificial Sequence
  Description of Artificial Sequence: Synthetic peptide
NANNNN

SEQ ID NO: 309 - protein, 6 aa, Artificial Sequence
  Description of Artificial Sequence: Synthetic peptide
NNANNN

SEQ ID NO: 310 - protein, 6 aa, Artificial Sequence
  Description of Artificial Sequence: Synthetic peptide
NNNANN

SEQ ID NO: 311 - protein, 6 aa, Artificial Sequence
  Description of Artificial Sequence: Synthetic peptide
NNNNAN

SEQ ID NO: 312 - protein, 6 aa, Artificial Sequence
  Description of Artificial Sequence: Synthetic peptide
NNNNAA

SEQ ID NO: 313 - protein, 6 aa, Artificial Sequence
  Description of Artificial Sequence: Synthetic peptide
AANNNN

SEQ ID NO: 314 - protein, 6 aa, Artificial Sequence
  Description of Artificial Sequence: Synthetic peptide
ANANNN

SEQ ID NO: 315 - protein, 6 aa, Artificial Sequence
  Description of Artificial Sequence: Synthetic peptide
ANNANN

SEQ ID NO: 316 - protein, 6 aa, Artificial Sequence
  Description of Artificial Sequence: Synthetic peptide
ANNNAN

SEQ ID NO: 317 - protein, 6 aa, Artificial Sequence
  Description of Artificial Sequence: Synthetic peptide
ANNNNA

SEQ ID NO: 318 - protein, 6 aa, Artificial Sequence
  Description of Artificial Sequence: Synthetic peptide
NAANNN

SEQ ID NO: 319 - protein, 6 aa, Artificial Sequence
  Description of Artificial Sequence: Synthetic peptide
NANANN

SEQ ID NO: 320 - protein, 6 aa, Artificial Sequence
  Description of Artificial Sequence: Synthetic peptide
NANNAN

SEQ ID NO: 321 - protein, 6 aa, Artificial Sequence
  Description of Artificial Sequence: Synthetic peptide
NANNNA

SEQ ID NO: 322 - protein, 6 aa, Artificial Sequence
  Description of Artificial Sequence: Synthetic peptide
NNAANN

SEQ ID NO: 323 - protein, 6 aa, Artificial Sequence
  Description of Artificial Sequence: Synthetic peptide
NNANAN

SEQ ID NO: 324 - protein, 6 aa, Artificial Sequence
  Description of Artificial Sequence: Synthetic peptide
NNANNA

SEQ ID NO: 325 - protein, 6 aa, Artificial Sequence
  Description of Artificial Sequence: Synthetic peptide
NNNAAN

SEQ ID NO: 326 - protein, 6 aa, Artificial Sequence
  Description of Artificial Sequence: Synthetic peptide
NNNANA

SEQ ID NO: 327 - protein, 7 aa, Artificial Sequence
  Description of Artificial Sequence: Synthetic peptide
NNNNAAA

SEQ ID NO: 328 - protein, 7 aa, Artificial Sequence
  Description of Artificial Sequence: Synthetic peptide
AAANNNN

SEQ ID NO: 329 - protein, 7 aa, Artificial Sequence
  Description of Artificial Sequence: Synthetic peptide
ANAANNN

SEQ ID NO: 330 - protein, 7 aa, Artificial Sequence
  Description of Artificial Sequence: Synthetic peptide
ANANANN

SEQ ID NO: 331 - protein, 7 aa, Artificial Sequence
  Description of Artificial Sequence: Synthetic peptide
ANANNAN

SEQ ID NO: 332 - protein, 7 aa, Artificial Sequence
  Description of Artificial Sequence: Synthetic peptide
ANANNNA

SEQ ID NO: 333 - protein, 7 aa, Artificial Sequence
  Description of Artificial Sequence: Synthetic peptide
ANNAANN

SEQ ID NO: 334 - protein, 7 aa, Artificial Sequence
  Description of Artificial Sequence: Synthetic peptide
ANNANAN

SEQ ID NO: 335 - protein, 7 aa, Artificial Sequence
  Description of Artificial Sequence: Synthetic peptide
ANNANNA

SEQ ID NO: 336 - protein, 7 aa, Artificial Sequence
  Description of Artificial Sequence: Synthetic peptide
ANNNANA

SEQ ID NO: 337 - protein, 7 aa, Artificial Sequence
  Description of Artificial Sequence: Synthetic peptide
ANNNAAN

SEQ ID NO: 338 - protein, 7 aa, Artificial Sequence
  Description of Artificial Sequence: Synthetic peptide
ANNNNAA

SEQ ID NO: 339 - protein, 7 aa, Artificial Sequence
  Description of Artificial Sequence: Synthetic peptide
AANANNN

SEQ ID NO: 340 - protein, 7 aa, Artificial Sequence
  Description of Artificial Sequence: Synthetic peptide
AANNANN

SEQ ID NO: 341 - protein, 7 aa, Artificial Sequence
  Description of Artificial Sequence: Synthetic peptide
AANNNAN

SEQ ID NO: 342 - protein, 7 aa, Artificial Sequence
  Description of Artificial Sequence: Synthetic peptide
AANNNNA

SEQ ID NO: 343 - protein, 7 aa, Artificial Sequence
  Description of Artificial Sequence: Synthetic peptide
NAAANNN

SEQ ID NO: 344 - protein, 7 aa, Artificial Sequence
  Description of Artificial Sequence: Synthetic peptide
NAANANN

SEQ ID NO: 345 - protein, 7 aa, Artificial Sequence
  Description of Artificial Sequence: Synthetic peptide
NAANNAN

SEQ ID NO: 346 - protein, 7 aa, Artificial Sequence
  Description of Artificial Sequence: Synthetic peptide
NAANNNA

SEQ ID NO: 347 - protein, 7 aa, Artificial Sequence
  Description of Artificial Sequence: Synthetic peptide
NANAANN

SEQ ID NO: 348 - protein, 7 aa, Artificial Sequence
  Description of Artificial Sequence: Synthetic peptide
NANNAAN

SEQ ID NO: 349 - protein, 7 aa, Artificial Sequence
  Description of Artificial Sequence: Synthetic peptide
NANNNAA

SEQ ID NO: 350 - protein, 7 aa, Artificial Sequence
  Description of Artificial Sequence: Synthetic peptide
NANANAN

SEQ ID NO: 351 - protein, 7 aa, Artificial Sequence
  Description of Artificial Sequence: Synthetic peptide
NANANNA

SEQ ID NO: 352 - protein, 7 aa, Artificial Sequence
  Description of Artificial Sequence: Synthetic peptide
NANNANA

SEQ ID NO: 353 - protein, 7 aa, Artificial Sequence
  Description of Artificial Sequence: Synthetic peptide
NNAAANN

SEQ ID NO: 354 - protein, 7 aa, Artificial Sequence
  Description of Artificial Sequence: Synthetic peptide
NNAANAN

SEQ ID NO: 355 - protein, 7 aa, Artificial Sequence
  Description of Artificial Sequence: Synthetic peptide
NNAANNA

SEQ ID NO: 356 - protein, 7 aa, Artificial Sequence
  Description of Artificial Sequence: Synthetic peptide
NNANAAN

SEQ ID NO: 357 - protein, 7 aa, Artificial Sequence
  Description of Artificial Sequence: Synthetic peptide
NNANANA

SEQ ID NO: 358 - protein, 7 aa, Artificial Sequence
  Description of Artificial Sequence: Synthetic peptide
NNANNAA

SEQ ID NO: 359 - protein, 7 aa, Artificial Sequence
  Description of Artificial Sequence: Synthetic peptide
NNNAAAN

SEQ ID NO: 360 - protein, 7 aa, Artificial Sequence
  Description of Artificial Sequence: Synthetic peptide
NNNAANA

SEQ ID NO: 361 - protein, 7 aa, Artificial Sequence
  Description of Artificial Sequence: Synthetic peptide
NNNANAA

SEQ ID NO: 362 - protein, 7 aa, Artificial Sequence
  Description of Artificial Sequence: Synthetic peptide
NNNNNAA

SEQ ID NO: 363 - protein, 7 aa, Artificial Sequence
  Description of Artificial Sequence: Synthetic peptide
AANNNNN

SEQ ID NO: 364 - protein, 7 aa, Artificial Sequence
  Description of Artificial Sequence: Synthetic peptide
ANANNNN

SEQ ID NO: 365 - protein, 7 aa, Artificial Sequence
  Description of Artificial Sequence: Synthetic peptide
ANNANNN

SEQ ID NO: 366 - protein, 7 aa, Artificial Sequence
  Description of Artificial Sequence: Synthetic peptide
ANNNANN

SEQ ID NO: 367 - protein, 7 aa, Artificial Sequence
  Description of Artificial Sequence: Synthetic peptide
ANNNNAN

SEQ ID NO: 368 - protein, 7 aa, Artificial Sequence
  Description of Artificial Sequence: Synthetic peptide
ANNNNNA

SEQ ID NO: 369 - protein, 7 aa, Artificial Sequence
  Description of Artificial Sequence: Synthetic peptide
NAANNNN

SEQ ID NO: 370 - protein, 7 aa, Artificial Sequence
  Description of Artificial Sequence: Synthetic peptide
NANANNN

SEQ ID NO: 371 - protein, 7 aa, Artificial Sequence
  Description of Artificial Sequence: Synthetic peptide
NANNANN

SEQ ID NO: 372 - protein, 7 aa, Artificial Sequence
  Description of Artificial Sequence: Synthetic peptide
NANNNAN

SEQ ID NO: 373 - protein, 7 aa, Artificial Sequence
  Description of Artificial Sequence: Synthetic peptide
NANNNNA

SEQ ID NO: 374 - protein, 7 aa, Artificial Sequence
  Description of Artificial Sequence: Synthetic peptide
NNAANNN

SEQ ID NO: 375 - protein, 7 aa, Artificial Sequence
  Description of Artificial Sequence: Synthetic peptide
NNANANN

SEQ ID NO: 376 - protein, 7 aa, Artificial Sequence
  Description of Artificial Sequence: Synthetic peptide
NNANNAN

SEQ ID NO: 377 - protein, 7 aa, Artificial Sequence
  Description of Artificial Sequence: Synthetic peptide
NNANNNA

SEQ ID NO: 378 - protein, 7 aa, Artificial Sequence
  Description of Artificial Sequence: Synthetic peptide
NNNAANN

SEQ ID NO: 379 - protein, 7 aa, Artificial Sequence
  Description of Artificial Sequence: Synthetic peptide
NNNANAN

SEQ ID NO: 380 - protein, 7 aa, Artificial Sequence
  Description of Artificial Sequence: Synthetic peptide
NNNANNA

SEQ ID NO: 381 - protein, 7 aa, Artificial Sequence
  Description of Artificial Sequence: Synthetic peptide
NNNNAAN

SEQ ID NO: 382 - protein, 7 aa, Artificial Sequence
  Description of Artificial Sequence: Synthetic peptide
NNNNANA

SEQ ID NO: 383 - protein, 7 aa, Artificial Sequence
  Description of Artificial Sequence: Synthetic peptide
NNNNNNA

SEQ ID NO: 384 - protein, 7 aa, Artificial Sequence
  Description of Artificial Sequence: Synthetic peptide
ANNNNNN

SEQ ID NO: 385 - protein, 7 aa, Artificial Sequence
  Description of Artificial Sequence: Synthetic peptide
NANNNNN

SEQ ID NO: 386 - protein, 7 aa, Artificial Sequence
  Description of Artificial Sequence: Synthetic peptide
NNANNNN

SEQ ID NO: 387 - protein, 7 aa, Artificial Sequence
  Description of Artificial Sequence: Synthetic peptide
NNNANNN

SEQ ID NO: 388 - protein, 7 aa, Artificial Sequence
  Description of Artificial Sequence: Synthetic peptide
NNNNANN

SEQ ID NO: 389 - protein, 7 aa, Artificial Sequence
  Description of Artificial Sequence: Synthetic peptide
NNNNNAN

SEQ ID NO: 390 - protein, 4 aa, Artificial Sequence
  Description of Artificial Sequence: Synthetic peptide
NNNS

SEQ ID NO: 391 - protein, 4 aa, Artificial Sequence
  Description of Artificial Sequence: Synthetic peptide
SNNN

SEQ ID NO: 392 - protein, 4 aa, Artificial Sequence
  Description of Artificial Sequence: Synthetic peptide
NSNN

SEQ ID NO: 393 - protein, 4 aa, Artificial Sequence
  Description of Artificial Sequence: Synthetic peptide
NNSN

SEQ ID NO: 394 - protein, 5 aa, Artificial Sequence
  Description of Artificial Sequence: Synthetic peptide
NNNNS

SEQ ID NO: 395 - protein, 5 aa, Artificial Sequence
  Description of Artificial Sequence: Synthetic peptide
SNNNN

SEQ ID NO: 396 - protein, 5 aa, Artificial Sequence
  Description of Artificial Sequence: Synthetic peptide
NSNNN

SEQ ID NO: 397 - protein, 5 aa, Artificial Sequence
  Description of Artificial Sequence: Synthetic peptide
NNSNN

SEQ ID NO: 398 - protein, 5 aa, Artificial Sequence
  Description of Artificial Sequence: Synthetic peptide
NNNSN

SEQ ID NO: 399 - protein, 5 aa, Artificial Sequence
  Description of Artificial Sequence: Synthetic peptide
NNNSS

SEQ ID NO: 400 - protein, 5 aa, Artificial Sequence
  Description of Artificial Sequence: Synthetic peptide
SSNNN

SEQ ID NO: 401 - protein, 5 aa, Artificial Sequence
  Description of Artificial Sequence: Synthetic peptide
SNSNN

SEQ ID NO: 402 - protein, 5 aa, Artificial Sequence
  Description of Artificial Sequence: Synthetic peptide
SNNSN

SEQ ID NO: 403 - protein, 5 aa, Artificial Sequence
  Description of Artificial Sequence: Synthetic peptide
SNNNS

SEQ ID NO: 404 - protein, 5 aa, Artificial Sequence
  Description of Artificial Sequence: Synthetic peptide
NSSNN

SEQ ID NO: 405 - protein, 5 aa, Artificial Sequence
  Description of Artificial Sequence: Synthetic peptide
NSNSN

SEQ ID NO: 406 - protein, 5 aa, Artificial Sequence
  Description of Artificial Sequence: Synthetic peptide
NSNNS

SEQ ID NO: 407 - protein, 5 aa, Artificial Sequence
  Description of Artificial Sequence: Synthetic peptide
NNSSN

SEQ ID NO: 408 - protein, 5 aa, Artificial Sequence
  Description of Artificial Sequence: Synthetic peptide
NNSNS

SEQ ID NO: 409 - protein, 6 aa, Artificial Sequence
  Description of Artificial Sequence: Synthetic peptide
NNNNNS

SEQ ID NO: 410 - protein, 6 aa, Artificial Sequence
  Description of Artificial Sequence: Synthetic peptide
SNNNNN

SEQ ID NO: 411 - protein, 6 aa, Artificial Sequence
  Description of Artificial Sequence: Synthetic peptide
NSNNNN

SEQ ID NO: 412 - protein, 6 aa, Artificial Sequence
  Description of Artificial Sequence: Synthetic peptide
NNSNNN

SEQ ID NO: 413 - protein, 6 aa, Artificial Sequence
  Description of Artificial Sequence: Synthetic peptide
NNNSNN

SEQ ID NO: 414 - protein, 6 aa, Artificial Sequence
  Description of Artificial Sequence: Synthetic peptide
NNNNSN

SEQ ID NO: 415 - protein, 6 aa, Artificial Sequence
  Description of Artificial Sequence: Synthetic peptide
NNNNSS

SEQ ID NO: 416 - protein, 6 aa, Artificial Sequence
  Description of Artificial Sequence: Synthetic peptide
SSNNNN

SEQ ID NO: 417 - protein, 6 aa, Artificial Sequence
  Description of Artificial Sequence: Synthetic peptide
SNSNNN

SEQ ID NO: 418 - protein, 6 aa, Artificial Sequence
  Description of Artificial Sequence: Synthetic peptide
SNNSNN

SEQ ID NO: 419 - protein, 6 aa, Artificial Sequence
  Description of Artificial Sequence: Synthetic peptide
SNNNSN

SEQ ID NO: 420 - protein, 6 aa, Artificial Sequence
  Description of Artificial Sequence: Synthetic peptide
SNNNNS

SEQ ID NO: 421 - protein, 6 aa, Artificial Sequence
  Description of Artificial Sequence: Synthetic peptide
NSSNNN

SEQ ID NO: 422 - protein, 6 aa, Artificial Sequence
  Description of Artificial Sequence: Synthetic peptide
NSNSNN

SEQ ID NO: 423 - protein, 6 aa, Artificial Sequence
  Description of Artificial Sequence: Synthetic peptide
NSNNSN

SEQ ID NO: 424 - protein, 6 aa, Artificial Sequence
  Description of Artificial Sequence: Synthetic peptide
NSNNNS

SEQ ID NO: 425 - protein, 6 aa, Artificial Sequence
  Description of Artificial Sequence: Synthetic peptide
NNSSNN

SEQ ID NO: 426 - protein, 6 aa, Artificial Sequence
  Description of Artificial Sequence: Synthetic peptide
NNSNSN

SEQ ID NO: 427 - protein, 6 aa, Artificial Sequence
  Description of Artificial Sequence: Synthetic peptide
NNSNNS

SEQ ID NO: 428 - protein, 6 aa, Artificial Sequence
  Description of Artificial Sequence: Synthetic peptide
NNNSSN

SEQ ID NO: 429 - protein, 6 aa, Artificial Sequence
  Description of Artificial Sequence: Synthetic peptide
NNNSNS

SEQ ID NO: 430 - protein, 7 aa, Artificial Sequence
  Description of Artificial Sequence: Synthetic peptide
NNNNSSS

SEQ ID NO: 431 - protein, 7 aa, Artificial Sequence
  Description of Artificial Sequence: Synthetic peptide
SSSNNNN

SEQ ID NO: 432 - protein, 7 aa, Artificial Sequence
  Description of Artificial Sequence: Synthetic peptide
SNSSNNN

SEQ ID NO: 433 - protein, 7 aa, Artificial Sequence
  Description of Artificial Sequence: Synthetic peptide
SNSNSNN

SEQ ID NO: 434 - protein, 7 aa, Artificial Sequence
  Description of Artificial Sequence: Synthetic peptide
SNSNNSN

SEQ ID NO: 435 - protein, 7 aa, Artificial Sequence
  Description of Artificial Sequence: Synthetic peptide
SNSNNNS

SEQ ID NO: 436 - protein, 7 aa, Artificial Sequence
  Description of Artificial Sequence: Synthetic peptide
SNNSSNN

SEQ ID NO: 437 - protein, 7 aa, Artificial Sequence
  Description of Artificial Sequence: Synthetic peptide
SNNSNSN

SEQ ID NO: 438 - protein, 7 aa, Artificial Sequence
  Description of Artificial Sequence: Synthetic peptide
SNNSNNS

SEQ ID NO: 439 - protein, 7 aa, Artificial Sequence
  Description of Artificial Sequence: Synthetic peptide
SNNNSNS

SEQ ID NO: 440 - protein, 7 aa, Artificial Sequence
  Description of Artificial Sequence: Synthetic peptide
SNNNSSN

SEQ ID NO: 441 - protein, 7 aa, Artificial Sequence
  Description of Artificial Sequence: Synthetic peptide
SNNNNSS

SEQ ID NO: 442 - protein, 7 aa, Artificial Sequence
  Description of Artificial Sequence: Synthetic peptide
SSNSNNN

SEQ ID NO: 443 - protein, 7 aa, Artificial Sequence
  Description of Artificial Sequence: Synthetic peptide
SSNNSNN

SEQ ID NO: 444 - protein, 7 aa, Artificial Sequence
  Description of Artificial Sequence: Synthetic peptide
SSNNNSN

SEQ ID NO: 445 - protein, 7 aa, Artificial Sequence
  Description of Artificial Sequence: Synthetic peptide
SSNNNNS

SEQ ID NO: 446 - protein, 7 aa, Artificial Sequence
  Description of Artificial Sequence: Synthetic peptide
NSSSNNN

SEQ ID NO: 447 - protein, 7 aa, Artificial Sequence
  Description of Artificial Sequence: Synthetic peptide
NSSNSNN

SEQ ID NO: 448 - protein, 7 aa, Artificial Sequence
  Description of Artificial Sequence: Synthetic peptide
NSSNNSN

SEQ ID NO: 449 - protein, 7 aa, Artificial Sequence
  Description of Artificial Sequence: Synthetic peptide
NSSNNNS

SEQ ID NO: 450 - protein, 7 aa, Artificial Sequence
  Description of Artificial Sequence: Synthetic peptide
NSNSSNN

SEQ ID NO: 451 - protein, 7 aa, Artificial Sequence
  Description of Artificial Sequence: Synthetic peptide
NSNNSSN

SEQ ID NO: 452 - protein, 7 aa, Artificial Sequence
  Description of Artificial Sequence: Synthetic peptide
NSNNNSS

SEQ ID NO: 453 - protein, 7 aa, Artificial Sequence
  Description of Artificial Sequence: Synthetic peptide
NSNSNSN

SEQ ID NO: 454 - protein, 7 aa, Artificial Sequence
  Description of Artificial Sequence: Synthetic peptide
NSNSNNS

SEQ ID NO: 455 - protein, 7 aa, Artificial Sequence
  Description of Artificial Sequence: Synthetic peptide
NSNNSNS

SEQ ID NO: 456 - protein, 7 aa, Artificial Sequence
  Description of Artificial Sequence: Synthetic peptide
NNSSSNN

SEQ ID NO: 457 - protein, 7 aa, Artificial Sequence
  Description of Artificial Sequence: Synthetic peptide
NNSSNSN

SEQ ID NO: 458 - protein, 7 aa, Artificial Sequence
  Description of Artificial Sequence: Synthetic peptide
NNSSNNS

SEQ ID NO: 459 - protein, 7 aa, Artificial Sequence
  Description of Artificial Sequence: Synthetic peptide
NNSNSSN

SEQ ID NO: 460 - protein, 7 aa, Artificial Sequence
  Description of Artificial Sequence: Synthetic peptide
NNSNSNS

SEQ ID NO: 461 - protein, 7 aa, Artificial Sequence
  Description of Artificial Sequence: Synthetic peptide
NNSNNSS

SEQ ID NO: 462 - protein, 7 aa, Artificial Sequence
  Description of Artificial Sequence: Synthetic peptide
NNNSSSN

SEQ ID NO: 463 - protein, 7 aa, Artificial Sequence
  Description of Artificial Sequence: Synthetic peptide
NNNSSNS

SEQ ID NO: 464 - protein, 7 aa, Artificial Sequence
  Description of Artificial Sequence: Synthetic peptide
NNNSNSS

SEQ ID NO: 465 - protein, 7 aa, Artificial Sequence
  Description of Artificial Sequence: Synthetic peptide
NNNNNSS

SEQ ID NO: 466 - protein, 7 aa, Artificial Sequence
  Description of Artificial Sequence: Synthetic peptide
SSNNNNN

SEQ ID NO: 467 - protein, 7 aa, Artificial Sequence
  Description of Artificial Sequence: Synthetic peptide
SNSNNNN

SEQ ID NO: 468 - protein, 7 aa, Artificial Sequence
  Description of Artificial Sequence: Synthetic peptide
SNNSNNN

SEQ ID NO: 469 - protein, 7 aa, Artificial Sequence
  Description of Artificial Sequence: Synthetic peptide
SNNNSNN

SEQ ID NO: 470 - protein, 7 aa, Artificial Sequence
  Description of Artificial Sequence: Synthetic peptide
SNNNNSN

SEQ ID NO: 471 - protein, 7 aa, Artificial Sequence
  Description of Artificial Sequence: Synthetic peptide
SNNNNNS

SEQ ID NO: 472 - protein, 7 aa, Artificial Sequence
  Description of Artificial Sequence: Synthetic peptide
NSSNNNN

SEQ ID NO: 473 - protein, 7 aa, Artificial Sequence
  Description of Artificial Sequence: Synthetic peptide
NSNSNNN

SEQ ID NO: 474 - protein, 7 aa, Artificial Sequence
  Description of Artificial Sequence: Synthetic peptide
NSNNSNN

SEQ ID NO: 475 - protein, 7 aa, Artificial Sequence
  Description of Artificial Sequence: Synthetic peptide
NSNNNSN

SEQ ID NO: 476 - protein, 7 aa, Artificial Sequence
  Description of Artificial Sequence: Synthetic peptide
NSNNNNS

SEQ ID NO: 477 - protein, 7 aa, Artificial Sequence
  Description of Artificial Sequence: Synthetic peptide
NNSSNNN

SEQ ID NO: 478 - protein, 7 aa, Artificial Sequence
  Description of Artificial Sequence: Synthetic peptide
NNSNSNN

SEQ ID NO: 479 - protein, 7 aa, Artificial Sequence
  Description of Artificial Sequence: Synthetic peptide
NNSNNSN

SEQ ID NO: 480 - protein, 7 aa, Artificial Sequence
  Description of Artificial Sequence: Synthetic peptide
NNSNNNS

SEQ ID NO: 481 - protein, 7 aa, Artificial Sequence
  Description of Artificial Sequence: Synthetic peptide
NNNSSNN

SEQ ID NO: 482 - protein, 7 aa, Artificial Sequence
  Description of Artificial Sequence: Synthetic peptide
NNNSNSN

SEQ ID NO: 483 - protein, 7 aa, Artificial Sequence
  Description of Artificial Sequence: Synthetic peptide
NNNSNNS

SEQ ID NO: 484 - protein, 7 aa, Artificial Sequence
  Description of Artificial Sequence: Synthetic peptide
NNNNSSN

SEQ ID NO: 485 - protein, 7 aa, Artificial Sequence
  Description of Artificial Sequence: Synthetic peptide
NNNNSNS

SEQ ID NO: 486 - protein, 7 aa, Artificial Sequence
  Description of Artificial Sequence: Synthetic peptide
NNNNNNS

SEQ ID NO: 487 - protein, 7 aa, Artificial Sequence
  Description of Artificial Sequence: Synthetic peptide
SNNNNNN

SEQ ID NO: 488 - protein, 7 aa, Artificial Sequence
  Description of Artificial Sequence: Synthetic peptide
NSNNNNN

SEQ ID NO: 489 - protein, 7 aa, Artificial Sequence
  Description of Artificial Sequence: Synthetic peptide
NNSNNNN

SEQ ID NO: 490 - protein, 7 aa, Artificial Sequence
  Description of Artificial Sequence: Synthetic peptide
NNNSNNN

SEQ ID NO: 491 - protein, 7 aa, Artificial Sequence
  Description of Artificial Sequence: Synthetic peptide
NNNNSNN

SEQ ID NO: 492 - protein, 7 aa, Artificial Sequence
  Description of Artificial Sequence: Synthetic peptide
NNNNNSN

SEQ ID NO: 493 - protein, 4 aa, Artificial Sequence
  Description of Artificial Sequence: Synthetic peptide
NNNQ

SEQ ID NO: 494 - protein, 4 aa, Artificial Sequence
  Description of Artificial Sequence: Synthetic peptide
QNNN

SEQ ID NO: 495 - protein, 4 aa, Artificial Sequence
  Description of Artificial Sequence: Synthetic peptide
NQNN

SEQ ID NO: 496 - protein, 4 aa, Artificial Sequence
  Description of Artificial Sequence: Synthetic peptide
NNQN

SEQ ID NO: 497 - protein, 5 aa, Artificial Sequence
  Description of Artificial Sequence: Synthetic peptide
NNNNQ

SEQ ID NO: 498 - protein, 5 aa, Artificial Sequence
  Description of Artificial Sequence: Synthetic peptide
QNNNN

SEQ ID NO: 499 - protein, 5 aa, Artificial Sequence
  Description of Artificial Sequence: Synthetic peptide
NQNNN

SEQ ID NO: 500 - protein, 5 aa, Artificial Sequence
  Description of Artificial Sequence: Synthetic peptide
NNQNN

SEQ ID NO: 501 - protein, 5 aa, Artificial Sequence
  Description of Artificial Sequence: Synthetic peptide
NNNQN

SEQ ID NO: 502 - protein, 5 aa, Artificial Sequence
  Description of Artificial Sequence: Synthetic peptide
NNNQQ

SEQ ID NO: 503 - protein, 5 aa, Artificial Sequence
  Description of Artificial Sequence: Synthetic peptide
QQNNN

SEQ ID NO: 504 - protein, 5 aa, Artificial Sequence
  Description of Artificial Sequence: Synthetic peptide
QNQNN

SEQ ID NO: 505 - protein, 5 aa, Artificial Sequence
  Description of Artificial Sequence: Synthetic peptide
QNNQN

SEQ ID NO: 506 - protein, 5 aa, Artificial Sequence
  Description of Artificial Sequence: Synthetic peptide
QNNNQ

SEQ ID NO: 507 - protein, 5 aa, Artificial Sequence
  Description of Artificial Sequence: Synthetic peptide
NQQNN

SEQ ID NO: 508 - protein, 5 aa, Artificial Sequence
  Description of Artificial Sequence: Synthetic peptide
NQNQN

SEQ ID NO: 509 - protein, 5 aa, Artificial Sequence
  Description of Artificial Sequence: Synthetic peptide
NQNNQ

SEQ ID NO: 510 - protein, 5 aa, Artificial Sequence
  Description of Artificial Sequence: Synthetic peptide
NNQQN

SEQ ID NO: 511 - protein, 5 aa, Artificial Sequence
  Description of Artificial Sequence: Synthetic peptide
NNQNQ

SEQ ID NO: 512 - protein, 6 aa, Artificial Sequence
  Description of Artificial Sequence: Synthetic peptide
NNNNNQ

SEQ ID NO: 513 - protein, 6 aa, Artificial Sequence
  Description of Artificial Sequence: Synthetic peptide
QNNNNN

SEQ ID NO: 514 - protein, 6 aa, Artificial Sequence
  Description of Artificial Sequence: Synthetic peptide
NQNNNN

SEQ ID NO: 515 - protein, 6 aa, Artificial Sequence
  Description of Artificial Sequence: Synthetic peptide
NNQNNN

SEQ ID NO: 516 - protein, 6 aa, Artificial Sequence
  Description of Artificial Sequence: Synthetic peptide
NNNQNN

SEQ ID NO: 517 - protein, 6 aa, Artificial Sequence
  Description of Artificial Sequence: Synthetic peptide
NNNNQN

SEQ ID NO: 518 - protein, 6 aa, Artificial Sequence
  Description of Artificial Sequence: Synthetic peptide
NNNNQQ

SEQ ID NO: 519 - protein, 6 aa, Artificial Sequence
  Description of Artificial Sequence: Synthetic peptide
QQNNNN

SEQ ID NO: 520 - protein, 6 aa, Artificial Sequence
  Description of Artificial Sequence: Synthetic peptide
QNQNNN

SEQ ID NO: 521 - protein, 6 aa, Artificial Sequence
  Description of Artificial Sequence: Synthetic peptide
QNNQNN

SEQ ID NO: 522 - protein, 6 aa, Artificial Sequence
  Description of Artificial Sequence: Synthetic peptide
QNNNQN

SEQ ID NO: 523 - protein, 6 aa, Artificial Sequence
  Description of Artificial Sequence: Synthetic peptide
QNNNNQ

SEQ ID NO: 524 - protein, 6 aa, Artificial Sequence
  Description of Artificial Sequence: Synthetic peptide
NQQNNN

SEQ ID NO: 525 - protein, 6 aa, Artificial Sequence
  Description of Artificial Sequence: Synthetic peptide
NQNQNN

SEQ ID NO: 526 - protein, 6 aa, Artificial Sequence
  Description of Artificial Sequence: Synthetic peptide
NQNNQN

SEQ ID NO: 527 - protein, 6 aa, Artificial Sequence
  Description of Artificial Sequence: Synthetic peptide
NQNNNQ

SEQ ID NO: 528 - protein, 6 aa, Artificial Sequence
  Description of Artificial Sequence: Synthetic peptide
NNQQNN

SEQ ID NO: 529 - protein, 6 aa, Artificial Sequence
  Description of Artificial Sequence: Synthetic peptide
NNQNQN

SEQ ID NO: 530 - protein, 6 aa, Artificial Sequence
  Description of Artificial Sequence: Synthetic peptide
NNQNNQ

SEQ ID NO: 531 - protein, 6 aa, Artificial Sequence
  Description of Artificial Sequence: Synthetic peptide
NNNQQN

SEQ ID NO: 532 - protein, 6 aa, Artificial Sequence
  Description of Artificial Sequence: Synthetic peptide
NNNQNQ

SEQ ID NO: 533 - protein, 7 aa, Artificial Sequence
  Description of Artificial Sequence: Synthetic peptide
NNNNQQQ

SEQ ID NO: 534 - protein, 7 aa, Artificial Sequence
  Description of Artificial Sequence: Synthetic peptide
QQQNNNN

SEQ ID NO: 535 - protein, 7 aa, Artificial Sequence
  Description of Artificial Sequence: Synthetic peptide
QNQQNNN

SEQ ID NO: 536 - protein, 7 aa, Artificial Sequence
  Description of Artificial Sequence: Synthetic peptide
QNQNQNN

SEQ ID NO: 537 - protein, 7 aa, Artificial Sequence
  Description of Artificial Sequence: Synthetic peptide
QNQNNQN

SEQ ID NO: 538 - protein, 7 aa, Artificial Sequence
  Description of Artificial Sequence: Synthetic peptide
QNQNNNQ

SEQ ID NO: 539 - protein, 7 aa, Artificial Sequence
  Description of Artificial Sequence: Synthetic peptide
QNNQQNN

SEQ ID NO: 540 - protein, 7 aa, Artificial Sequence
  Description of Artificial Sequence: Synthetic peptide
QNNQNQN

SEQ ID NO: 541 - protein, 7 aa, Artificial Sequence
  Description of Artificial Sequence: Synthetic peptide
QNNQNNQ

SEQ ID NO: 542 - protein, 7 aa, Artificial Sequence
  Description of Artificial Sequence: Synthetic peptide
QNNNQNQ

SEQ ID NO: 543 - protein, 7 aa, Artificial Sequence
  Description of Artificial Sequence: Synthetic peptide
QNNNQQN

SEQ ID NO: 544 - protein, 7 aa, Artificial Sequence
  Description of Artificial Sequence: Synthetic peptide
QNNNNQQ

SEQ ID NO: 545 - protein, 7 aa, Artificial Sequence
  Description of Artificial Sequence: Synthetic peptide
QQNQNNN

SEQ ID NO: 546 - protein, 7 aa, Artificial Sequence
  Description of Artificial Sequence: Synthetic peptide
QQNNQNN

SEQ ID NO: 547 - protein, 7 aa, Artificial Sequence
  Description of Artificial Sequence: Synthetic peptide
QQNNNQN

SEQ ID NO: 548 - protein, 7 aa, Artificial Sequence
  Description of Artificial Sequence: Synthetic peptide
QQNNNNQ

SEQ ID NO: 549 - protein, 7 aa, Artificial Sequence
  Description of Artificial Sequence: Synthetic peptide
NQQQNNN

SEQ ID NO: 550 - protein, 7 aa, Artificial Sequence
  Description of Artificial Sequence: Synthetic peptide
NQQNQNN

SEQ ID NO: 551 - protein, 7 aa, Artificial Sequence
  Description of Artificial Sequence: Synthetic peptide
NQQNNQN

SEQ ID NO: 552 - protein, 7 aa, Artificial Sequence
  Description of Artificial Sequence: Synthetic peptide
NQQNNNQ

SEQ ID NO: 553 - protein, 7 aa, Artificial Sequence
  Description of Artificial Sequence: Synthetic peptide
NQNQQNN

SEQ ID NO: 554 - protein, 7 aa, Artificial Sequence
  Description of Artificial Sequence: Synthetic peptide
NQNNQQN

SEQ ID NO: 555 - protein, 7 aa, Artificial Sequence
  Description of Artificial Sequence: Synthetic peptide
NQNNNQQ

SEQ ID NO: 556 - protein, 7 aa, Artificial Sequence
  Description of Artificial Sequence: Synthetic peptide
NQNQNQN

SEQ ID NO: 557 - protein, 7 aa, Artificial Sequence
  Description of Artificial Sequence: Synthetic peptide
NQNQNNQ

SEQ ID NO: 558 - protein, 7 aa, Artificial Sequence
  Description of Artificial Sequence: Synthetic peptide
NQNNQNQ

SEQ ID NO: 559 - protein, 7 aa, Artificial Sequence
  Description of Artificial Sequence: Synthetic peptide
NNQQQNN

SEQ ID NO: 560 - protein, 7 aa, Artificial Sequence
  Description of Artificial Sequence: Synthetic peptide
NNQQNQN

SEQ ID NO: 561 - protein, 7 aa, Artificial Sequence
  Description of Artificial Sequence: Synthetic peptide
NNQQNNQ

SEQ ID NO: 562 - protein, 7 aa, Artificial Sequence
  Description of Artificial Sequence: Synthetic peptide
NNQNQQN

SEQ ID NO: 563 - protein, 7 aa, Artificial Sequence
  Description of Artificial Sequence: Synthetic peptide
NNQNQNQ

SEQ ID NO: 564 - protein, 7 aa, Artificial Sequence
  Description of Artificial Sequence: Synthetic peptide
NNQNNQQ

SEQ ID NO: 565 - protein, 7 aa, Artificial Sequence
  Description of Artificial Sequence: Synthetic peptide
NNNQQQN

SEQ ID NO: 566 - protein, 7 aa, Artificial Sequence
  Description of Artificial Sequence: Synthetic peptide
NNNQQNQ

SEQ ID NO: 567 - protein, 7 aa, Artificial Sequence
  Description of Artificial Sequence: Synthetic peptide
NNNQNQQ

SEQ ID NO: 568 - protein, 7 aa, Artificial Sequence
  Description of Artificial Sequence: Synthetic peptide
NNNNNQQ

SEQ ID NO: 569 - protein, 7 aa, Artificial Sequence
  Description of Artificial Sequence: Synthetic peptide
QQNNNNN

SEQ ID NO: 570 - protein, 7 aa, Artificial Sequence
  Description of Artificial Sequence: Synthetic peptide
QNQNNNN

SEQ ID NO: 571 - protein, 7 aa, Artificial Sequence
  Description of Artificial Sequence: Synthetic peptide
QNNQNNN

SEQ ID NO: 572 - protein, 7 aa, Artificial Sequence
  Description of Artificial Sequence: Synthetic peptide
QNNNQNN

SEQ ID NO: 573 - protein, 7 aa, Artificial Sequence
  Description of Artificial Sequence: Synthetic peptide
QNNNNQN

SEQ ID NO: 574 - protein, 7 aa, Artificial Sequence
  Description of Artificial Sequence: Synthetic peptide
QNNNNNQ

SEQ ID NO: 575 - protein, 7 aa, Artificial Sequence
  Description of Artificial Sequence: Synthetic peptide
NQQNNNN

SEQ ID NO: 576 - protein, 7 aa, Artificial Sequence
  Description of Artificial Sequence: Synthetic peptide
NQNQNNN

SEQ ID NO: 577 - protein, 7 aa, Artificial Sequence
  Description of Artificial Sequence: Synthetic peptide
NQNNQNN

SEQ ID NO: 578 - protein, 7 aa, Artificial Sequence
  Description of Artificial Sequence: Synthetic peptide
NQNNNQN

SEQ ID NO: 579 - protein, 7 aa, Artificial Sequence
  Description of Artificial Sequence: Synthetic peptide
NQNNNNQ

SEQ ID NO: 580 - protein, 7 aa, Artificial Sequence
  Description of Artificial Sequence: Synthetic peptide
NNQQNNN

SEQ ID NO: 581 - protein, 7 aa, Artificial Sequence
  Description of Artificial Sequence: Synthetic peptide
NNQNQNN

SEQ ID NO: 582 - protein, 7 aa, Artificial Sequence
  Description of Artificial Sequence: Synthetic peptide
NNQNNQN

SEQ ID NO: 583 - protein, 7 aa, Artificial Sequence
  Description of Artificial Sequence: Synthetic peptide
NNQNNNQ

SEQ ID NO: 584 - protein, 7 aa, Artificial Sequence
  Description of Artificial Sequence: Synthetic peptide
NNNQQNN

SEQ ID NO: 585 - protein, 7 aa, Artificial Sequence
  Description of Artificial Sequence: Synthetic peptide
NNNQNQN

SEQ ID NO: 586 - protein, 7 aa, Artificial Sequence
  Description of Artificial Sequence: Synthetic peptide
NNNQNNQ

SEQ ID NO: 587 - protein, 7 aa, Artificial Sequence
  Description of Artificial Sequence: Synthetic peptide
NNNNQQN

SEQ ID NO: 588 - protein, 7 aa, Artificial Sequence
  Description of Artificial Sequence: Synthetic peptide
NNNNQNQ

SEQ ID NO: 589 - protein, 7 aa, Artificial Sequence
  Description of Artificial Sequence: Synthetic peptide
NNNNNNQ

SEQ ID NO: 590 - protein, 7 aa, Artificial Sequence
  Description of Artificial Sequence: Synthetic peptide
QNNNNNN

SEQ ID NO: 591 - protein, 7 aa, Artificial Sequence
  Description of Artificial Sequence: Synthetic peptide
NQNNNNN

SEQ ID NO: 592 - protein, 7 aa, Artificial Sequence
  Description of Artificial Sequence: Synthetic peptide
NNQNNNN

SEQ ID NO: 593 - protein, 7 aa, Artificial Sequence
  Description of Artificial Sequence: Synthetic peptide
NNNQNNN

SEQ ID NO: 594 - protein, 7 aa, Artificial Sequence
  Description of Artificial Sequence: Synthetic peptide
NNNNQNN

SEQ ID NO: 595 - protein, 7 aa, Artificial Sequence
  Description of Artificial Sequence: Synthetic peptide
NNNNNQN

SEQ ID NO: 596 - protein, 4 aa, Artificial Sequence
  Description of Artificial Sequence: Synthetic peptide
NNNE

SEQ ID NO: 597 - protein, 4 aa, Artificial Sequence
  Description of Artificial Sequence: Synthetic peptide
ENNN

SEQ ID NO: 598 - protein, 4 aa, Artificial Sequence
  Description of Artificial Sequence: Synthetic peptide
NENN

SEQ ID NO: 599 - protein, 4 aa, Artificial Sequence
  Description of Artificial Sequence: Synthetic peptide
NNEN

SEQ ID NO: 600 - protein, 5 aa, Artificial Sequence
  Description of Artificial Sequence: Synthetic peptide
NNNNE

SEQ ID NO: 601 - protein, 5 aa, Artificial Sequence
  Description of Artificial Sequence: Synthetic peptide
ENNNN

SEQ ID NO: 602 - protein, 5 aa, Artificial Sequence
  Description of Artificial Sequence: Synthetic peptide
NENNN

SEQ ID NO: 603 - protein, 5 aa, Artificial Sequence
  Description of Artificial Sequence: Synthetic peptide
NNENN

SEQ ID NO: 604 - protein, 5 aa, Artificial Sequence
  Description of Artificial Sequence: Synthetic peptide
NNNEN

SEQ ID NO: 605 - protein, 5 aa, Artificial Sequence
  Description of Artificial Sequence: Synthetic peptide
NNNEE

SEQ ID NO: 606 - protein, 5 aa, Artificial Sequence
  Description of Artificial Sequence: Synthetic peptide
EENNN

SEQ ID NO: 607 - protein, 5 aa, Artificial Sequence
  Description of Artificial Sequence: Synthetic peptide
ENENN

SEQ ID NO: 608 - protein, 5 aa, Artificial Sequence
  Description of Artificial Sequence: Synthetic peptide
ENNEN

SEQ ID NO: 609 - protein, 5 aa, Artificial Sequence
  Description of Artificial Sequence: Synthetic peptide
ENNNE

SEQ ID NO: 610 - protein, 5 aa, Artificial Sequence
  Description of Artificial Sequence: Synthetic peptide
NEENN

SEQ ID NO: 611 - protein, 5 aa, Artificial Sequence
  Description of Artificial Sequence: Synthetic peptide
NENEN

SEQ ID NO: 612 - protein, 5 aa, Artificial Sequence
  Description of Artificial Sequence: Synthetic peptide
NENNE

SEQ ID NO: 613 - protein, 5 aa, Artificial Sequence
  Description of Artificial Sequence: Synthetic peptide
NNEEN

SEQ ID NO: 614 - protein, 5 aa, Artificial Sequence
  Description of Artificial Sequence: Synthetic peptide
NNENE

SEQ ID NO: 615 - protein, 6 aa, Artificial Sequence
  Description of Artificial Sequence: Synthetic peptide
NNNNNE

SEQ ID NO: 616 - protein, 6 aa, Artificial Sequence
  Description of Artificial Sequence: Synthetic peptide
ENNNNN

SEQ ID NO: 617 - protein, 6 aa, Artificial Sequence
  Description of Artificial Sequence: Synthetic peptide
NENNNN

SEQ ID NO: 618 - protein, 6 aa, Artificial Sequence
  Description of Artificial Sequence: Synthetic peptide
NNENNN

SEQ ID NO: 619 - protein, 6 aa, Artificial Sequence
  Description of Artificial Sequence: Synthetic peptide
NNNENN

SEQ ID NO: 620 - protein, 6 aa, Artificial Sequence
  Description of Artificial Sequence: Synthetic peptide
NNNNEN

SEQ ID NO: 621 - protein, 6 aa, Artificial Sequence
  Description of Artificial Sequence: Synthetic peptide
NNNNEE

SEQ ID NO: 622 - protein, 6 aa, Artificial Sequence
  Description of Artificial Sequence: Synthetic peptide
EENNNN

SEQ ID NO: 623 - protein, 6 aa, Artificial Sequence
  Description of Artificial Sequence: Synthetic peptide
ENENNN

SEQ ID NO: 624 - protein, 6 aa, Artificial Sequence
  Description of Artificial Sequence: Synthetic peptide
ENNENN

SEQ ID NO: 625 - protein, 6 aa, Artificial Sequence
  Description of Artificial Sequence: Synthetic peptide
ENNNEN

SEQ ID NO: 626 - protein, 6 aa, Artificial Sequence
  Description of Artificial Sequence: Synthetic peptide
ENNNNE

SEQ ID NO: 627 - protein, 6 aa, Artificial Sequence
  Description of Artificial Sequence: Synthetic peptide
NEENNN

SEQ ID NO: 628 - protein, 6 aa, Artificial Sequence
  Description of Artificial Sequence: Synthetic peptide
NENENN

SEQ ID NO: 629 - protein, 6 aa, Artificial Sequence
  Description of Artificial Sequence: Synthetic peptide
NENNEN

SEQ ID NO: 630 - protein, 6 aa, Artificial Sequence
  Description of Artificial Sequence: Synthetic peptide
NENNNE

SEQ ID NO: 631 - protein, 6 aa, Artificial Sequence
  Description of Artificial Sequence: Synthetic peptide
NNEENN

SEQ ID NO: 632 - protein, 6 aa, Artificial Sequence
  Description of Artificial Sequence: Synthetic peptide
NNENEN

SEQ ID NO: 633 - protein, 6 aa, Artificial Sequence
  Description of Artificial Sequence: Synthetic peptide
NNENNE

SEQ ID NO: 634 - protein, 6 aa, Artificial Sequence
  Description of Artificial Sequence: Synthetic peptide
NNNEEN

SEQ ID NO: 635 - protein, 6 aa, Artificial Sequence
  Description of Artificial Sequence: Synthetic peptide
NNNENE

SEQ ID NO: 636 - protein, 7 aa, Artificial Sequence
  Description of Artificial Sequence: Synthetic peptide
NNNNEEE

SEQ ID NO: 637 - protein, 7 aa, Artificial Sequence
  Description of Artificial Sequence: Synthetic peptide
EEENNNN

SEQ ID NO: 638 - protein, 7 aa, Artificial Sequence
  Description of Artificial Sequence: Synthetic peptide
ENEENNN

SEQ ID NO: 639 - protein, 7 aa, Artificial Sequence
  Description of Artificial Sequence: Synthetic peptide
ENENENN

SEQ ID NO: 640 - protein, 7 aa, Artificial Sequence
  Description of Artificial Sequence: Synthetic peptide
ENENNEN

SEQ ID NO: 641 - protein, 7 aa, Artificial Sequence
  Description of Artificial Sequence: Synthetic peptide
ENENNNE

SEQ ID NO: 642 - protein, 7 aa, Artificial Sequence
  Description of Artificial Sequence: Synthetic peptide
ENNEENN

SEQ ID NO: 643 - protein, 7 aa, Artificial Sequence
  Description of Artificial Sequence: Synthetic peptide
ENNENEN

SEQ ID NO: 644 - protein, 7 aa, Artificial Sequence
  Description of Artificial Sequence: Synthetic peptide
ENNENNE

SEQ ID NO: 645 - protein, 7 aa, Artificial Sequence
  Description of Artificial Sequence: Synthetic peptide
ENNNENE

SEQ ID NO: 646 - protein, 7 aa, Artificial Sequence
  Description of Artificial Sequence: Synthetic peptide
ENNNEEN

SEQ ID NO: 647 - protein, 7 aa, Artificial Sequence
  Description of Artificial Sequence: Synthetic peptide
ENNNNEE

SEQ ID NO: 648 - protein, 7 aa, Artificial Sequence
  Description of Artificial Sequence: Synthetic peptide
EENENNN

SEQ ID NO: 649 - protein, 7 aa, Artificial Sequence
  Description of Artificial Sequence: Synthetic peptide
EENNENN

SEQ ID NO: 650 - protein, 7 aa, Artificial Sequence
  Description of Artificial Sequence: Synthetic peptide
EENNNEN

SEQ ID NO: 651 - protein, 7 aa, Artificial Sequence
  Description of Artificial Sequence: Synthetic peptide
EENNNNE

SEQ ID NO: 652 - protein, 7 aa, Artificial Sequence
  Description of Artificial Sequence: Synthetic peptide
NEEENNN

SEQ ID NO: 653 - protein, 7 aa, Artificial Sequence
  Description of Artificial Sequence: Synthetic peptide
NEENENN

SEQ ID NO: 654 - protein, 7 aa, Artificial Sequence
  Description of Artificial Sequence: Synthetic peptide
NEENNEN

SEQ ID NO: 655 - protein, 7 aa, Artificial Sequence
  Description of Artificial Sequence: Synthetic peptide
NEENNNE

SEQ ID NO: 656 - protein, 7 aa, Artificial Sequence
  Description of Artificial Sequence: Synthetic peptide
NENEENN

SEQ ID NO: 657 - protein, 7 aa, Artificial Sequence
  Description of Artificial Sequence: Synthetic peptide
NENNEEN

SEQ ID NO: 658 - protein, 7 aa, Artificial Sequence
  Description of Artificial Sequence: Synthetic peptide
NENNNEE

SEQ ID NO: 659 - protein, 7 aa, Artificial Sequence
  Description of Artificial Sequence: Synthetic peptide
NENENEN

SEQ ID NO: 660 - protein, 7 aa, Artificial Sequence
  Description of Artificial Sequence: Synthetic peptide
NENENNE

SEQ ID NO: 661 - protein, 7 aa, Artificial Sequence
  Description of Artificial Sequence: Synthetic peptide
NENNENE

SEQ ID NO: 662 - protein, 7 aa, Artificial Sequence
  Description of Artificial Sequence: Synthetic peptide
NNEEENN

SEQ ID NO: 663 - protein, 7 aa, Artificial Sequence
  Description of Artificial Sequence: Synthetic peptide
NNEENEN

SEQ ID NO: 664 - protein, 7 aa, Artificial Sequence
  Description of Artificial Sequence: Synthetic peptide
NNEENNE

SEQ ID NO: 665 - protein, 7 aa, Artificial Sequence
  Description of Artificial Sequence: Synthetic peptide
NNENEEN

SEQ ID NO: 666 - protein, 7 aa, Artificial Sequence
  Description of Artificial Sequence: Synthetic peptide
NNENENE

SEQ ID NO: 667 - protein, 7 aa, Artificial Sequence
  Description of Artificial Sequence: Synthetic peptide
NNENNEE

SEQ ID NO: 668 - protein, 7 aa, Artificial Sequence
  Description of Artificial Sequence: Synthetic peptide
NNNEEEN

SEQ ID NO: 669 - protein, 7 aa, Artificial Sequence
  Description of Artificial Sequence: Synthetic peptide
NNNEENE

SEQ ID NO: 670 - protein, 7 aa, Artificial Sequence
  Description of Artificial Sequence: Synthetic peptide
NNNENEE

SEQ ID NO: 671 - protein, 7 aa, Artificial Sequence
  Description of Artificial Sequence: Synthetic peptide
NNNNNEE

SEQ ID NO: 672 - protein, 7 aa, Artificial Sequence
  Description of Artificial Sequence: Synthetic peptide
EENNNNN

SEQ ID NO: 673 - protein, 7 aa, Artificial Sequence
  Description of Artificial Sequence: Synthetic peptide
ENENNNN

SEQ ID NO: 674 - protein, 7 aa, Artificial Sequence
  Description of Artificial Sequence: Synthetic peptide
ENNENNN

SEQ ID NO: 675 - protein, 7 aa, Artificial Sequence
  Description of Artificial Sequence: Synthetic peptide
ENNNENN

SEQ ID NO: 676 - protein, 7 aa, Artificial Sequence
  Description of Artificial Sequence: Synthetic peptide
ENNNNEN

SEQ ID NO: 677 - protein, 7 aa, Artificial Sequence
  Description of Artificial Sequence: Synthetic peptide
ENNNNNE

SEQ ID NO: 678 - protein, 7 aa, Artificial Sequence
  Description of Artificial Sequence: Synthetic peptide
NEENNNN

SEQ ID NO: 679 - protein, 7 aa, Artificial Sequence
  Description of Artificial Sequence: Synthetic peptide
NENENNN

SEQ ID NO: 680 - protein, 7 aa, Artificial Sequence
  Description of Artificial Sequence: Synthetic peptide
NENNENN

SEQ ID NO: 681 - protein, 7 aa, Artificial Sequence
  Description of Artificial Sequence: Synthetic peptide
NENNNEN

SEQ ID NO: 682 - protein, 7 aa, Artificial Sequence
  Description of Artificial Sequence: Synthetic peptide
NENNNNE

SEQ ID NO: 683 - protein, 7 aa, Artificial Sequence
  Description of Artificial Sequence: Synthetic peptide
NNEENNN

SEQ ID NO: 684 - protein, 7 aa, Artificial Sequence
  Description of Artificial Sequence: Synthetic peptide
NNENENN

SEQ ID NO: 685 - protein, 7 aa, Artificial Sequence
  Description of Artificial Sequence: Synthetic peptide
NNENNEN

SEQ ID NO: 686 - protein, 7 aa, Artificial Sequence
  Description of Artificial Sequence: Synthetic peptide
NNENNNE

SEQ ID NO: 687 - protein, 7 aa, Artificial Sequence
  Description of Artificial Sequence: Synthetic peptide
NNNEENN

SEQ ID NO: 688 - protein, 7 aa, Artificial Sequence
  Description of Artificial Sequence: Synthetic peptide
NNNENEN

SEQ ID NO: 689 - protein, 7 aa, Artificial Sequence
  Description of Artificial Sequence: Synthetic peptide
NNNENNE

SEQ ID NO: 690 - protein, 7 aa, Artificial Sequence
  Description of Artificial Sequence: Synthetic peptide
NNNNEEN

SEQ ID NO: 691 - protein, 7 aa, Artificial Sequence
  Description of Artificial Sequence: Synthetic peptide
NNNNENE

SEQ ID NO: 692 - protein, 7 aa, Artificial Sequence
  Description of Artificial Sequence: Synthetic peptide
NNNNNNE

SEQ ID NO: 693 - protein, 7 aa, Artificial Sequence
  Description of Artificial Sequence: Synthetic peptide
ENNNNNN

SEQ ID NO: 694 - protein, 7 aa, Artificial Sequence
  Description of Artificial Sequence: Synthetic peptide
NENNNNN

SEQ ID NO: 695 - protein, 7 aa, Artificial Sequence
  Description of Artificial Sequence: Synthetic peptide
NNENNNN

SEQ ID NO: 696 - protein, 7 aa, Artificial Sequence
  Description of Artificial Sequence: Synthetic peptide
NNNENNN

SEQ ID NO: 697 - protein, 7 aa, Artificial Sequence
  Description of Artificial Sequence: Synthetic peptide
NNNNENN

SEQ ID NO: 698 - protein, 7 aa, Artificial Sequence
  Description of Artificial Sequence: Synthetic peptide
NNNNNEN

SEQ ID NO: 699 - protein, 4 aa, Artificial Sequence
  Description of Artificial Sequence: Synthetic peptide
NNNH

SEQ ID NO: 700 - protein, 4 aa, Artificial Sequence
  Description of Artificial Sequence: Synthetic peptide
HNNN

SEQ ID NO: 701 - protein, 4 aa, Artificial Sequence
  Description of Artificial Sequence: Synthetic peptide
NHNN

SEQ ID NO: 702 - protein, 4 aa, Artificial Sequence
  Description of Artificial Sequence: Synthetic peptide
NNHN

SEQ ID NO: 703 - protein, 5 aa, Artificial Sequence
  Description of Artificial Sequence: Synthetic peptide
NNNNH

SEQ ID NO: 704 - protein, 5 aa, Artificial Sequence
  Description of Artificial Sequence: Synthetic peptide
HNNNN

SEQ ID NO: 705 - protein, 5 aa, Artificial Sequence
  Description of Artificial Sequence: Synthetic peptide
NHNNN

SEQ ID NO: 706 - protein, 5 aa, Artificial Sequence
  Description of Artificial Sequence: Synthetic peptide
NNHNN

SEQ ID NO: 707 - protein, 5 aa, Artificial Sequence
  Description of Artificial Sequence: Synthetic peptide
NNNHN

SEQ ID NO: 708 - protein, 5 aa, Artificial Sequence
  Description of Artificial Sequence: Synthetic peptide
NNNHH

SEQ ID NO: 709 - protein, 5 aa, Artificial Sequence
  Description of Artificial Sequence: Synthetic peptide
HHNNN

SEQ ID NO: 710 - protein, 5 aa, Artificial Sequence
  Description of Artificial Sequence: Synthetic peptide
HNHNN

SEQ ID NO: 711 - protein, 5 aa, Artificial Sequence
  Description of Artificial Sequence: Synthetic peptide
HNNHN

SEQ ID NO: 712 - protein, 5 aa, Artificial Sequence
  Description of Artificial Sequence: Synthetic peptide
HNNNH

SEQ ID NO: 713 - protein, 5 aa, Artificial Sequence
  Description of Artificial Sequence: Synthetic peptide
NHHNN

SEQ ID NO: 714 - protein, 5 aa, Artificial Sequence
  Description of Artificial Sequence: Synthetic peptide
NHNHN

SEQ ID NO: 715 - protein, 5 aa, Artificial Sequence
  Description of Artificial Sequence: Synthetic peptide
NHNNH

SEQ ID NO: 716 - protein, 5 aa, Artificial Sequence
  Description of Artificial Sequence: Synthetic peptide
NNHHN

SEQ ID NO: 717 - protein, 5 aa, Artificial Sequence
  Description of Artificial Sequence: Synthetic peptide
NNHNH

SEQ ID NO: 718 - protein, 6 aa, Artificial Sequence
  Description of Artificial Sequence: Synthetic peptide
NNNNNH

SEQ ID NO: 719 - protein, 6 aa, Artificial Sequence
  Description of Artificial Sequence: Synthetic peptide
HNNNNN

SEQ ID NO: 720 - protein, 6 aa, Artificial Sequence
  Description of Artificial Sequence: Synthetic peptide
NHNNNN

SEQ ID NO: 721 - protein, 6 aa, Artificial Sequence
  Description of Artificial Sequence: Synthetic peptide
NNHNNN

SEQ ID NO: 722 - protein, 6 aa, Artificial Sequence
  Description of Artificial Sequence: Synthetic peptide
NNNHNN

SEQ ID NO: 723 - protein, 6 aa, Artificial Sequence
  Description of Artificial Sequence: Synthetic peptide
NNNNHN

SEQ ID NO: 724 - protein, 6 aa, Artificial Sequence
  Description of Artificial Sequence: Synthetic peptide
NNNNHH

SEQ ID NO: 725 - protein, 6 aa, Artificial Sequence
  Description of Artificial Sequence: Synthetic peptide
HHNNNN

SEQ ID NO: 726 - protein, 6 aa, Artificial Sequence
  Description of Artificial Sequence: Synthetic peptide
HNHNNN

SEQ ID NO: 727 - protein, 6 aa, Artificial Sequence
  Description of Artificial Sequence: Synthetic peptide
HNNHNN

SEQ ID NO: 728 - protein, 6 aa, Artificial Sequence
  Description of Artificial Sequence: Synthetic peptide
HNNNHN

SEQ ID NO: 729 - protein, 6 aa, Artificial Sequence
  Description of Artificial Sequence: Synthetic peptide
HNNNNH

SEQ ID NO: 730 - protein, 6 aa, Artificial Sequence
  Description of Artificial Sequence: Synthetic peptide
NHHNNN

SEQ ID NO: 731 - protein, 6 aa, Artificial Sequence
  Description of Artificial Sequence: Synthetic peptide
NHNHNN

SEQ ID NO: 732 - protein, 6 aa, Artificial Sequence
  Description of Artificial Sequence: Synthetic peptide
NHNNHN

SEQ ID NO: 733 - protein, 6 aa, Artificial Sequence
  Description of Artificial Sequence: Synthetic peptide
NHNNNH

SEQ ID NO: 734 - protein, 6 aa, Artificial Sequence
  Description of Artificial Sequence: Synthetic peptide
NNHHNN

SEQ ID NO: 735 - protein, 6 aa, Artificial Sequence
  Description of Artificial Sequence: Synthetic peptide
NNHNHN

SEQ ID NO: 736 - protein, 6 aa, Artificial Sequence
  Description of Artificial Sequence: Synthetic peptide
NNHNNH

SEQ ID NO: 737 - protein, 6 aa, Artificial Sequence
  Description of Artificial Sequence: Synthetic peptide
NNNHHN

SEQ ID NO: 738 - protein, 6 aa, Artificial Sequence
  Description of Artificial Sequence: Synthetic peptide
NNNHNH

SEQ ID NO: 739 - protein, 7 aa, Artificial Sequence
  Description of Artificial Sequence: Synthetic peptide
NNNNHHH

SEQ ID NO: 740 - protein, 7 aa, Artificial Sequence
  Description of Artificial Sequence: Synthetic peptide
HHHNNNN

SEQ ID NO: 741 - protein, 7 aa, Artificial Sequence
  Description of Artificial Sequence: Synthetic peptide
HNHHNNN

SEQ ID NO: 742 - protein, 7 aa, Artificial Sequence
  Description of Artificial Sequence: Synthetic peptide
HNHNHNN

SEQ ID NO: 743 - protein, 7 aa, Artificial Sequence
  Description of Artificial Sequence: Synthetic peptide
HNHNNHN

SEQ ID NO: 744 - protein, 7 aa, Artificial Sequence
  Description of Artificial Sequence: Synthetic peptide
HNHNNNH

SEQ ID NO: 745 - protein, 7 aa, Artificial Sequence
  Description of Artificial Sequence: Synthetic peptide
HNNHHNN

SEQ ID NO: 746 - protein, 7 aa, Artificial Sequence
  Description of Artificial Sequence: Synthetic peptide
HNNHNHN

SEQ ID NO: 747 - protein, 7 aa, Artificial Sequence
  Description of Artificial Sequence: Synthetic peptide
HNNHNNH

SEQ ID NO: 748 - protein, 7 aa, Artificial Sequence
  Description of Artificial Sequence: Synthetic peptide
HNNNHNH

SEQ ID NO: 749 - protein, 7 aa, Artificial Sequence
  Description of Artificial Sequence: Synthetic peptide
HNNNHHN

SEQ ID NO: 750 - protein, 7 aa, Artificial Sequence
  Description of Artificial Sequence: Synthetic peptide
HNNNNHH

SEQ ID NO: 751 - protein, 7 aa, Artificial Sequence
  Description of Artificial Sequence: Synthetic peptide
HHNHNNN

SEQ ID NO: 752 - protein, 7 aa, Artificial Sequence
  Description of Artificial Sequence: Synthetic peptide
HHNNHNN

SEQ ID NO: 753 - protein, 7 aa, Artificial Sequence
  Description of Artificial Sequence: Synthetic peptide
HHNNNHN

SEQ ID NO: 754 - protein, 7 aa, Artificial Sequence
  Description of Artificial Sequence: Synthetic peptide
HHNNNNH

SEQ ID NO: 755 - protein, 7 aa, Artificial Sequence
  Description of Artificial Sequence: Synthetic peptide
NHHHNNN

SEQ ID NO: 756 - protein, 7 aa, Artificial Sequence
  Description of Artificial Sequence: Synthetic peptide
NHHNHNN

SEQ ID NO: 757 - protein, 7 aa, Artificial Sequence
  Description of Artificial Sequence: Synthetic peptide
NHHNNHN

SEQ ID NO: 758 - protein, 7 aa, Artificial Sequence
  Description of Artificial Sequence: Synthetic peptide
NHHNNNH

SEQ ID NO: 759 - protein, 7 aa, Artificial Sequence
  Description of Artificial Sequence: Synthetic peptide
NHNHHNN

SEQ ID NO: 760 - protein, 7 aa, Artificial Sequence
  Description of Artificial Sequence: Synthetic peptide
NHNNHHN

SEQ ID NO: 761 - protein, 7 aa, Artificial Sequence
  Description of Artificial Sequence: Synthetic peptide
NHNNNHH

SEQ ID NO: 762 - protein, 7 aa, Artificial Sequence
  Description of Artificial Sequence: Synthetic peptide
NHNHNHN

SEQ ID NO: 763 - protein, 7 aa, Artificial Sequence
  Description of Artificial Sequence: Synthetic peptide
NHNHNNH

SEQ ID NO: 764 - protein, 7 aa, Artificial Sequence
  Description of Artificial Sequence: Synthetic peptide
NHNNHNH

SEQ ID NO: 765 - protein, 7 aa, Artificial Sequence
  Description of Artificial Sequence: Synthetic peptide
NNHHHNN

SEQ ID NO: 766 - protein, 7 aa, Artificial Sequence
  Description of Artificial Sequence: Synthetic peptide
NNHHNHN

SEQ ID NO: 767 - protein, 7 aa, Artificial Sequence
  Description of Artificial Sequence: Synthetic peptide
NNHHNNH

SEQ ID NO: 768 - protein, 7 aa, Artificial Sequence
  Description of Artificial Sequence: Synthetic peptide
NNHNHHN

SEQ ID NO: 769 - protein, 7 aa, Artificial Sequence
  Description of Artificial Sequence: Synthetic peptide
NNHNHNH

SEQ ID NO: 770 - protein, 7 aa, Artificial Sequence
  Description of Artificial Sequence: Synthetic peptide
NNHNNHH

SEQ ID NO: 771 - protein, 7 aa, Artificial Sequence
  Description of Artificial Sequence: Synthetic peptide
NNNHHHN

SEQ ID NO: 772 - protein, 7 aa, Artificial Sequence
  Description of Artificial Sequence: Synthetic peptide
NNNHHNH

SEQ ID NO: 773 - protein, 7 aa, Artificial Sequence
  Description of Artificial Sequence: Synthetic peptide
NNNHNHH

SEQ ID NO: 774 - protein, 7 aa, Artificial Sequence
  Description of Artificial Sequence: Synthetic peptide
NNNNNHH

SEQ ID NO: 775 - protein, 7 aa, Artificial Sequence
  Description of Artificial Sequence: Synthetic peptide
HHNNNNN

SEQ ID NO: 776 - protein, 7 aa, Artificial Sequence
  Description of Artificial Sequence: Synthetic peptide
HNHNNNN

SEQ ID NO: 777 - protein, 7 aa, Artificial Sequence
  Description of Artificial Sequence: Synthetic peptide
HNNHNNN

SEQ ID NO: 778 - protein, 7 aa, Artificial Sequence
  Description of Artificial Sequence: Synthetic peptide
HNNNHNN

SEQ ID NO: 779 - protein, 7 aa, Artificial Sequence
  Description of Artificial Sequence: Synthetic peptide
HNNNNHN

SEQ ID NO: 780 - protein, 7 aa, Artificial Sequence
  Description of Artificial Sequence: Synthetic peptide
HNNNNNH

SEQ ID NO: 781 - protein, 7 aa, Artificial Sequence
  Description of Artificial Sequence: Synthetic peptide
NHHNNNN

SEQ ID NO: 782 - protein, 7 aa, Artificial Sequence
  Description of Artificial Sequence: Synthetic peptide
NHNHNNN

SEQ ID NO: 783 - protein, 7 aa, Artificial Sequence
  Description of Artificial Sequence: Synthetic peptide
NHNNHNN

SEQ ID NO: 784 - protein, 7 aa, Artificial Sequence
  Description of Artificial Sequence: Synthetic peptide
NHNNNHN

SEQ ID NO: 785 - protein, 7 aa, Artificial Sequence
  Description of Artificial Sequence: Synthetic peptide
NHNNNNH

SEQ ID NO: 786 - protein, 7 aa, Artificial Sequence
  Description of Artificial Sequence: Synthetic peptide
NNHHNNN

SEQ ID NO: 787 - protein, 7 aa, Artificial Sequence
  Description of Artificial Sequence: Synthetic peptide
NNHNHNN

SEQ ID NO: 788 - protein, 7 aa, Artificial Sequence
  Description of Artificial Sequence: Synthetic peptide
NNHNNHN

SEQ ID NO: 789 - protein, 7 aa, Artificial Sequence
  Description of Artificial Sequence: Synthetic peptide
NNHNNNH

SEQ ID NO: 790 - protein, 7 aa, Artificial Sequence
  Description of Artificial Sequence: Synthetic peptide
NNNHHNN

SEQ ID NO: 791 - protein, 7 aa, Artificial Sequence
  Description of Artificial Sequence: Synthetic peptide
NNNHNHN

SEQ ID NO: 792 - protein, 7 aa, Artificial Sequence
  Description of Artificial Sequence: Synthetic peptide
NNNHNNH

SEQ ID NO: 793 - protein, 7 aa, Artificial Sequence
  Description of Artificial Sequence: Synthetic peptide
NNNNHHN

SEQ ID NO: 794 - protein, 7 aa, Artificial Sequence
  Description of Artificial Sequence: Synthetic peptide
NNNNHNH

SEQ ID NO: 795 - protein, 7 aa, Artificial Sequence
  Description of Artificial Sequence: Synthetic peptide
NNNNNNH

SEQ ID NO: 796 - protein, 7 aa, Artificial Sequence
  Description of Artificial Sequence: Synthetic peptide
HNNNNNN

SEQ ID NO: 797 - protein, 7 aa, Artificial Sequence
  Description of Artificial Sequence: Synthetic peptide
NHNNNNN

SEQ ID NO: 798 - protein, 7 aa, Artificial Sequence
  Description of Artificial Sequence: Synthetic peptide
NNHNNNN

SEQ ID NO: 799 - protein, 7 aa, Artificial Sequence
  Description of Artificial Sequence: Synthetic peptide
NNNHNNN

SEQ ID NO: 800 - protein, 7 aa, Artificial Sequence
  Description of Artificial Sequence: Synthetic peptide
NNNNHNN

SEQ ID NO: 801 - protein, 7 aa, Artificial Sequence
  Description of Artificial Sequence: Synthetic peptide
NNNNNHN

SEQ ID NO: 802 - protein, 4 aa, Artificial Sequence
  Description of Artificial Sequence: Synthetic peptide
NNND

SEQ ID NO: 803 - protein, 4 aa, Artificial Sequence
  Description of Artificial Sequence: Synthetic peptide
DNNN

SEQ ID NO: 804 - protein, 4 aa, Artificial Sequence
  Description of Artificial Sequence: Synthetic peptide
NDNN

SEQ ID NO: 805 - protein, 4 aa, Artificial Sequence
  Description of Artificial Sequence: Synthetic peptide
NNDN

SEQ ID NO: 806 - protein, 5 aa, Artificial Sequence
  Description of Artificial Sequence: Synthetic peptide
NNNND

SEQ ID NO: 807 - protein, 5 aa, Artificial Sequence
  Description of Artificial Sequence: Synthetic peptide
DNNNN

SEQ ID NO: 808 - protein, 5 aa, Artificial Sequence
  Description of Artificial Sequence: Synthetic peptide
NDNNN

SEQ ID NO: 809 - protein, 5 aa, Artificial Sequence
  Description of Artificial Sequence: Synthetic peptide
NNDNN

SEQ ID NO: 810 - protein, 5 aa, Artificial Sequence
  Description of Artificial Sequence: Synthetic peptide
NNNDN

SEQ ID NO: 811 - protein, 5 aa, Artificial Sequence
  Description of Artificial Sequence: Synthetic peptide
NNNDD

SEQ ID NO: 812 - protein, 5 aa, Artificial Sequence
  Description of Artificial Sequence: Synthetic peptide
DDNNN

SEQ ID NO: 813 - protein, 5 aa, Artificial Sequence
  Description of Artificial Sequence: Synthetic peptide
DNDNN

SEQ ID NO: 814 - protein, 5 aa, Artificial Sequence
  Description of Artificial Sequence: Synthetic peptide
DNNDN

SEQ ID NO: 815 - protein, 5 aa, Artificial Sequence
  Description of Artificial Sequence: Synthetic peptide
DNNND

SEQ ID NO: 816 - protein, 5 aa, Artificial Sequence
  Description of Artificial Sequence: Synthetic peptide
NDDNN

SEQ ID NO: 817 - protein, 5 aa, Artificial Sequence
  Description of Artificial Sequence: Synthetic peptide
NDNDN

SEQ ID NO: 818 - protein, 5 aa, Artificial Sequence
  Description of Artificial Sequence: Synthetic peptide
NDNND

SEQ ID NO: 819 - protein, 5 aa, Artificial Sequence
  Description of Artificial Sequence: Synthetic peptide
NNDDN

SEQ ID NO: 820 - protein, 5 aa, Artificial Sequence
  Description of Artificial Sequence: Synthetic peptide
NNDND

SEQ ID NO: 821 - protein, 6 aa, Artificial Sequence
  Description of Artificial Sequence: Synthetic peptide
NNNNND

SEQ ID NO: 822 - protein, 6 aa, Artificial Sequence
  Description of Artificial Sequence: Synthetic peptide
DNNNNN

SEQ ID NO: 823 - protein, 6 aa, Artificial Sequence
  Description of Artificial Sequence: Synthetic peptide
NDNNNN

SEQ ID NO: 824 - protein, 6 aa, Artificial Sequence
  Description of Artificial Sequence: Synthetic peptide
NNDNNN

SEQ ID NO: 825 - protein, 6 aa, Artificial Sequence
  Description of Artificial Sequence: Synthetic peptide
NNNDNN

SEQ ID NO: 826 - protein, 6 aa, Artificial Sequence
  Description of Artificial Sequence: Synthetic peptide
NNNNDN

SEQ ID NO: 827 - protein, 6 aa, Artificial Sequence
  Description of Artificial Sequence: Synthetic peptide
NNNNDD

SEQ ID NO: 828 - protein, 6 aa, Artificial Sequence
  Description of Artificial Sequence: Synthetic peptide
DDNNNN

SEQ ID NO: 829 - protein, 6 aa, Artificial Sequence
  Description of Artificial Sequence: Synthetic peptide
DNDNNN

SEQ ID NO: 830 - protein, 6 aa, Artificial Sequence
  Description of Artificial Sequence: Synthetic peptide
DNNDNN

SEQ ID NO: 831 - protein, 6 aa, Artificial Sequence
  Description of Artificial Sequence: Synthetic peptide
DNNNDN

SEQ ID NO: 832 - protein, 6 aa, Artificial Sequence
  Description of Artificial Sequence: Synthetic peptide
DNNNND

SEQ ID NO: 833 - protein, 6 aa, Artificial Sequence
  Description of Artificial Sequence: Synthetic peptide
NDDNNN

SEQ ID NO: 834 - protein, 6 aa, Artificial Sequence
  Description of Artificial Sequence: Synthetic peptide
NDNDNN

SEQ ID NO: 835 - protein, 6 aa, Artificial Sequence
  Description of Artificial Sequence: Synthetic peptide
NDNNDN

SEQ ID NO: 836 - protein, 6 aa, Artificial Sequence
  Description of Artificial Sequence: Synthetic peptide
NDNNND

SEQ ID NO: 837 - protein, 6 aa, Artificial Sequence
  Description of Artificial Sequence: Synthetic peptide
NNDDNN

SEQ ID NO: 838 - protein, 6 aa, Artificial Sequence
  Description of Artificial Sequence: Synthetic peptide
NNDNDN

SEQ ID NO: 839 - protein, 6 aa, Artificial Sequence
  Description of Artificial Sequence: Synthetic peptide
NNDNND

SEQ ID NO: 840 - protein, 6 aa, Artificial Sequence
  Description of Artificial Sequence: Synthetic peptide
NNNDDN

SEQ ID NO: 841 - protein, 6 aa, Artificial Sequence
  Description of Artificial Sequence: Synthetic peptide
NNNDND

SEQ ID NO: 842 - protein, 7 aa, Artificial Sequence
  Description of Artificial Sequence: Synthetic peptide
NNNNDDD

SEQ ID NO: 843 - protein, 7 aa, Artificial Sequence
  Description of Artificial Sequence: Synthetic peptide
DDDNNNN

SEQ ID NO: 844 - protein, 7 aa, Artificial Sequence
  Description of Artificial Sequence: Synthetic peptide
DNDDNNN

SEQ ID NO: 845 - protein, 7 aa, Artificial Sequence
  Description of Artificial Sequence: Synthetic peptide
DNDNDNN

SEQ ID NO: 846 - protein, 7 aa, Artificial Sequence
  Description of Artificial Sequence: Synthetic peptide
DNDNNDN

SEQ ID NO: 847 - protein, 7 aa, Artificial Sequence
  Description of Artificial Sequence: Synthetic peptide
DNDNNND

SEQ ID NO: 848 - protein, 7 aa, Artificial Sequence
  Description of Artificial Sequence: Synthetic peptide
DNNDDNN

SEQ ID NO: 849 - protein, 7 aa, Artificial Sequence
  Description of Artificial Sequence: Synthetic peptide
DNNDNDN

SEQ ID NO: 850 - protein, 7 aa, Artificial Sequence
  Description of Artificial Sequence: Synthetic peptide
DNNDNND

SEQ ID NO: 851 - protein, 7 aa, Artificial Sequence
  Description of Artificial Sequence: Synthetic peptide
DNNNDND

SEQ ID NO: 852 - protein, 7 aa, Artificial Sequence
  Description of Artificial Sequence: Synthetic peptide
DNNNDDN

SEQ ID NO: 853 - protein, 7 aa, Artificial Sequence
  Description of Artificial Sequence: Synthetic peptide
DNNNNDD

SEQ ID NO: 854 - protein, 7 aa, Artificial Sequence
  Description of Artificial Sequence: Synthetic peptide
DDNDNNN

SEQ ID NO: 855 - protein, 7 aa, Artificial Sequence
  Description of Artificial Sequence: Synthetic peptide
DDNNDNN

SEQ ID NO: 856 - protein, 7 aa, Artificial Sequence
  Description of Artificial Sequence: Synthetic peptide
DDNNNDN

SEQ ID NO: 857 - protein, 7 aa, Artificial Sequence
  Description of Artificial Sequence: Synthetic peptide
DDNNNND

SEQ ID NO: 858 - protein, 7 aa, Artificial Sequence
  Description of Artificial Sequence: Synthetic peptide
NDDDNNN

SEQ ID NO: 859 - protein, 7 aa, Artificial Sequence
  Description of Artificial Sequence: Synthetic peptide
NDDNDNN

SEQ ID NO: 860 - protein, 7 aa, Artificial Sequence
  Description of Artificial Sequence: Synthetic peptide
NDDNNDN

SEQ ID NO: 861 - protein, 7 aa, Artificial Sequence
  Description of Artificial Sequence: Synthetic peptide
NDDNNND

SEQ ID NO: 862 - protein, 7 aa, Artificial Sequence
  Description of Artificial Sequence: Synthetic peptide
NDNDDNN

SEQ ID NO: 863 - protein, 7 aa, Artificial Sequence
  Description of Artificial Sequence: Synthetic peptide
NDNNDDN

SEQ ID NO: 864 - protein, 7 aa, Artificial Sequence
  Description of Artificial Sequence: Synthetic peptide
NDNNNDD

SEQ ID NO: 865 - protein, 7 aa, Artificial Sequence
  Description of Artificial Sequence: Synthetic peptide
NDNDNDN

SEQ ID NO: 866 - protein, 7 aa, Artificial Sequence
  Description of Artificial Sequence: Synthetic peptide
NDNDNND

SEQ ID NO: 867 - protein, 7 aa, Artificial Sequence
  Description of Artificial Sequence: Synthetic peptide
NDNNDND

SEQ ID NO: 868 - protein, 7 aa, Artificial Sequence
  Description of Artificial Sequence: Synthetic peptide
NNDDDNN

SEQ ID NO: 869 - protein, 7 aa, Artificial Sequence
  Description of Artificial Sequence: Synthetic peptide
NNDDNDN

SEQ ID NO: 870 - protein, 7 aa, Artificial Sequence
  Description of Artificial Sequence: Synthetic peptide
NNDDNND

SEQ ID NO: 871 - protein, 7 aa, Artificial Sequence
  Description of Artificial Sequence: Synthetic peptide
NNDNDDN

SEQ ID NO: 872 - protein, 7 aa, Artificial Sequence
  Description of Artificial Sequence: Synthetic peptide
NNDNDND

SEQ ID NO: 873 - protein, 7 aa, Artificial Sequence
  Description of Artificial Sequence: Synthetic peptide
NNDNNDD

SEQ ID NO: 874 - protein, 7 aa, Artificial Sequence
  Description of Artificial Sequence: Synthetic peptide
NNNDDDN

SEQ ID NO: 875 - protein, 7 aa, Artificial Sequence
  Description of Artificial Sequence: Synthetic peptide
NNNDDND

SEQ ID NO: 876 - protein, 7 aa, Artificial Sequence
  Description of Artificial Sequence: Synthetic peptide
NNNDNDD

SEQ ID NO: 877 - protein, 7 aa, Artificial Sequence
  Description of Artificial Sequence: Synthetic peptide
NNNNNDD

SEQ ID NO: 878 - protein, 7 aa, Artificial Sequence
  Description of Artificial Sequence: Synthetic peptide
DDNNNNN

SEQ ID NO: 879 - protein, 7 aa, Artificial Sequence
  Description of Artificial Sequence: Synthetic peptide
DNDNNNN

SEQ ID NO: 880 - protein, 7 aa, Artificial Sequence
  Description of Artificial Sequence: Synthetic peptide
DNNDNNN

SEQ ID NO: 881 - protein, 7 aa, Artificial Sequence
  Description of Artificial Sequence: Synthetic peptide
DNNNDNN

SEQ ID NO: 882 - protein, 7 aa, Artificial Sequence
  Description of Artificial Sequence: Synthetic peptide
DNNNNDN

SEQ ID NO: 883 - protein, 7 aa, Artificial Sequence
  Description of Artificial Sequence: Synthetic peptide
DNNNNND

SEQ ID NO: 884 - protein, 7 aa, Artificial Sequence
  Description of Artificial Sequence: Synthetic peptide
NDDNNNN

SEQ ID NO: 885 - protein, 7 aa, Artificial Sequence
  Description of Artificial Sequence: Synthetic peptide
NDNDNNN

SEQ ID NO: 886 - protein, 7 aa, Artificial Sequence
  Description of Artificial Sequence: Synthetic peptide
NDNNDNN

SEQ ID NO: 887 - protein, 7 aa, Artificial Sequence
  Description of Artificial Sequence: Synthetic peptide
NDNNNDN

SEQ ID NO: 888 - protein, 7 aa, Artificial Sequence
  Description of Artificial Sequence: Synthetic peptide
NDNNNND

SEQ ID NO: 889 - protein, 7 aa, Artificial Sequence
  Description of Artificial Sequence: Synthetic peptide
NNDDNNN

SEQ ID NO: 890 - protein, 7 aa, Artificial Sequence
  Description of Artificial Sequence: Synthetic peptide
NNDNDNN

SEQ ID NO: 891 - protein, 7 aa, Artificial Sequence
  Description of Artificial Sequence: Synthetic peptide
NNDNNDN

SEQ ID NO: 892 - protein, 7 aa, Artificial Sequence
  Description of Artificial Sequence: Synthetic peptide
NNDNNND

SEQ ID NO: 893 - protein, 7 aa, Artificial Sequence
  Description of Artificial Sequence: Synthetic peptide
NNNDDNN

SEQ ID NO: 894 - protein, 7 aa, Artificial Sequence
  Description of Artificial Sequence: Synthetic peptide
NNNDNDN

SEQ ID NO: 895 - protein, 7 aa, Artificial Sequence
  Description of Artificial Sequence: Synthetic peptide
NNNDNND

SEQ ID NO: 896 - protein, 7 aa, Artificial Sequence
  Description of Artificial Sequence: Synthetic peptide
NNNNDDN

SEQ ID NO: 897 - protein, 7 aa, Artificial Sequence
  Description of Artificial Sequence: Synthetic peptide
NNNNDND

SEQ ID NO: 898 - protein, 7 aa, Artificial Sequence
  Description of Artificial Sequence: Synthetic peptide
NNNNNND

SEQ ID NO: 899 - protein, 7 aa, Artificial Sequence
  Description of Artificial Sequence: Synthetic peptide
DNNNNNN

SEQ ID NO: 900 - protein, 7 aa, Artificial Sequence
  Description of Artificial Sequence: Synthetic peptide
NDNNNNN

SEQ ID NO: 901 - protein, 7 aa, Artificial Sequence
  Description of Artificial Sequence: Synthetic peptide
NNDNNNN

SEQ ID NO: 902 - protein, 7 aa, Artificial Sequence
  Description of Artificial Sequence: Synthetic peptide
NNNDNNN

SEQ ID NO: 903 - protein, 7 aa, Artificial Sequence
  Description of Artificial Sequence: Synthetic peptide
NNNNDNN

SEQ ID NO: 904 - protein, 7 aa, Artificial Sequence
  Description of Artificial Sequence: Synthetic peptide
NNNNNDN

SEQ ID NO: 905 - protein, 4 aa, Artificial Sequence
  Description of Artificial Sequence: Synthetic peptide
GGGT

SEQ ID NO: 906 - protein, 4 aa, Artificial Sequence
  Description of Artificial Sequence: Synthetic peptide
TGGG

SEQ ID NO: 907 - protein, 4 aa, Artificial Sequence
  Description of Artificial Sequence: Synthetic peptide
GTGG

SEQ ID NO: 908 - protein, 4 aa, Artificial Sequence
  Description of Artificial Sequence: Synthetic peptide
GGTG

SEQ ID NO: 909 - protein, 5 aa, Artificial Sequence
  Description of Artificial Sequence: Synthetic peptide
GGGGT

SEQ ID NO: 910 - protein, 5 aa, Artificial Sequence
  Description of Artificial Sequence: Synthetic peptide
TGGGG

SEQ ID NO: 911 - protein, 5 aa, Artificial Sequence
  Description of Artificial Sequence: Synthetic peptide
GTGGG

SEQ ID NO: 912 - protein, 5 aa, Artificial Sequence
  Description of Artificial Sequence: Synthetic peptide
GGTGG

SEQ ID NO: 913 - protein, 5 aa, Artificial Sequence
  Description of Artificial Sequence: Synthetic peptide
GGGTG

SEQ ID NO: 914 - protein, 5 aa, Artificial Sequence
  Description of Artificial Sequence: Synthetic peptide
GGGTT

SEQ ID NO: 915 - protein, 5 aa, Artificial Sequence
  Description of Artificial Sequence: Synthetic peptide
TTGGG

SEQ ID NO: 916 - protein, 5 aa, Artificial Sequence
  Description of Artificial Sequence: Synthetic peptide
TGTGG

SEQ ID NO: 917 - protein, 5 aa, Artificial Sequence
  Description of Artificial Sequence: Synthetic peptide
TGGTG

SEQ ID NO: 918 - protein, 5 aa, Artificial Sequence
  Description of Artificial Sequence: Synthetic peptide
TGGGT

SEQ ID NO: 919 - protein, 5 aa, Artificial Sequence
  Description of Artificial Sequence: Synthetic peptide
GTTGG

SEQ ID NO: 920 - protein, 5 aa, Artificial Sequence
  Description of Artificial Sequence: Synthetic peptide
GTGTG

SEQ ID NO: 921 - protein, 5 aa, Artificial Sequence
  Description of Artificial Sequence: Synthetic peptide
GTGGT

SEQ ID NO: 922 - protein, 5 aa, Artificial Sequence
  Description of Artificial Sequence: Synthetic peptide
GGTTG

SEQ ID NO: 923 - protein, 5 aa, Artificial Sequence
  Description of Artificial Sequence: Synthetic peptide
GGTGT

SEQ ID NO: 924 - protein, 6 aa, Artificial Sequence
  Description of Artificial Sequence: Synthetic peptide
GGGGGT

SEQ ID NO: 925 - protein, 6 aa, Artificial Sequence
  Description of Artificial Sequence: Synthetic peptide
TGGGGG

SEQ ID NO: 926 - protein, 6 aa, Artificial Sequence
  Description of Artificial Sequence: Synthetic peptide
GTGGGG

SEQ ID NO: 927 - protein, 6 aa, Artificial Sequence
  Description of Artificial Sequence: Synthetic peptide
GGTGGG

SEQ ID NO: 928 - protein, 6 aa, Artificial Sequence
  Description of Artificial Sequence: Synthetic peptide
GGGTGG

SEQ ID NO: 929 - protein, 6 aa, Artificial Sequence
  Description of Artificial Sequence: Synthetic peptide
GGGGTG

SEQ ID NO: 930 - protein, 6 aa, Artificial Sequence
  Description of Artificial Sequence: Synthetic peptide
GGGGTT

SEQ ID NO: 931 - protein, 6 aa, Artificial Sequence
  Description of Artificial Sequence: Synthetic peptide
TTGGGG

SEQ ID NO: 932 - protein, 6 aa, Artificial Sequence
  Description of Artificial Sequence: Synthetic peptide
TGTGGG

SEQ ID NO: 933 - protein, 6 aa, Artificial Sequence
  Description of Artificial Sequence: Synthetic peptide
TGGTGG

SEQ ID NO: 934 - protein, 6 aa, Artificial Sequence
  Description of Artificial Sequence: Synthetic peptide
TGGGTG

SEQ ID NO: 935 - protein, 6 aa, Artificial Sequence
  Description of Artificial Sequence: Synthetic peptide
TGGGGT

SEQ ID NO: 936 - protein, 6 aa, Artificial Sequence
  Description of Artificial Sequence: Synthetic peptide
GTTGGG

SEQ ID NO: 937 - protein, 6 aa, Artificial Sequence
  Description of Artificial Sequence: Synthetic peptide
GTGTGG

SEQ ID NO: 938 - protein, 6 aa, Artificial Sequence
  Description of Artificial Sequence: Synthetic peptide
GTGGTG

SEQ ID NO: 939 - protein, 6 aa, Artificial Sequence
  Description of Artificial Sequence: Synthetic peptide
GTGGGT

SEQ ID NO: 940 - protein, 6 aa, Artificial Sequence
  Description of Artificial Sequence: Synthetic peptide
GGTTGG

SEQ ID NO: 941 - protein, 6 aa, Artificial Sequence
  Description of Artificial Sequence: Synthetic peptide
GGTGTG

SEQ ID NO: 942 - protein, 6 aa, Artificial Sequence
  Description of Artificial Sequence: Synthetic peptide
GGTGGT

SEQ ID NO: 943 - protein, 6 aa, Artificial Sequence
  Description of Artificial Sequence: Synthetic peptide
GGGTTG

SEQ ID NO: 944 - protein, 6 aa, Artificial Sequence
  Description of Artificial Sequence: Synthetic peptide
GGGTGT

SEQ ID NO: 945 - protein, 7 aa, Artificial Sequence
  Description of Artificial Sequence: Synthetic peptide
GGGGTTT

SEQ ID NO: 946 - protein, 7 aa, Artificial Sequence
  Description of Artificial Sequence: Synthetic peptide
TTTGGGG

SEQ ID NO: 947 - protein, 7 aa, Artificial Sequence
  Description of Artificial Sequence: Synthetic peptide
TGTTGGG

SEQ ID NO: 948 - protein, 7 aa, Artificial Sequence
  Description of Artificial Sequence: Synthetic peptide
TGTGTGG

SEQ ID NO: 949 - protein, 7 aa, Artificial Sequence
  Description of Artificial Sequence: Synthetic peptide
TGTGGTG

SEQ ID NO: 950 - protein, 7 aa, Artificial Sequence
  Description of Artificial Sequence: Synthetic peptide
TGTGGGT

SEQ ID NO: 951 - protein, 7 aa, Artificial Sequence
  Description of Artificial Sequence: Synthetic peptide
TGGTTGG

SEQ ID NO: 952 - protein, 7 aa, Artificial Sequence
  Description of Artificial Sequence: Synthetic peptide
TGGTGTG

SEQ ID NO: 953 - protein, 7 aa, Artificial Sequence
  Description of Artificial Sequence: Synthetic peptide
TGGTGGT

SEQ ID NO: 954 - protein, 7 aa, Artificial Sequence
  Description of Artificial Sequence: Synthetic peptide
TGGGTGT

SEQ ID NO: 955 - protein, 7 aa, Artificial Sequence
  Description of Artificial Sequence: Synthetic peptide
TGGGTTG

SEQ ID NO: 956 - protein, 7 aa, Artificial Sequence
  Description of Artificial Sequence: Synthetic peptide
TGGGGTT

SEQ ID NO: 957 - protein, 7 aa, Artificial Sequence
  Description of Artificial Sequence: Synthetic peptide
TTGTGGG

SEQ ID NO: 958 - protein, 7 aa, Artificial Sequence
  Description of Artificial Sequence: Synthetic peptide
TTGGTGG

SEQ ID NO: 959 - protein, 7 aa, Artificial Sequence
  Description of Artificial Sequence: Synthetic peptide
TTGGGTG

SEQ ID NO: 960 - protein, 7 aa, Artificial Sequence
  Description of Artificial Sequence: Synthetic peptide
TTGGGGT

SEQ ID NO: 961 - protein, 7 aa, Artificial Sequence
  Description of Artificial Sequence: Synthetic peptide
GTTTGGG

SEQ ID NO: 962 - protein, 7 aa, Artificial Sequence
  Description of Artificial Sequence: Synthetic peptide
GTTGTGG

SEQ ID NO: 963 - protein, 7 aa, Artificial Sequence
  Description of Artificial Sequence: Synthetic peptide
GTTGGTG

SEQ ID NO: 964 - protein, 7 aa, Artificial Sequence
  Description of Artificial Sequence: Synthetic peptide
GTTGGGT

SEQ ID NO: 965 - protein, 7 aa, Artificial Sequence
  Description of Artificial Sequence: Synthetic peptide
GTGTTGG

SEQ ID NO: 966 - protein, 7 aa, Artificial Sequence
  Description of Artificial Sequence: Synthetic peptide
GTGGTTG

SEQ ID NO: 967 - protein, 7 aa, Artificial Sequence
  Description of Artificial Sequence: Synthetic peptide
GTGGGTT

SEQ ID NO: 968 - protein, 7 aa, Artificial Sequence
  Description of Artificial Sequence: Synthetic peptide
GTGTGTG

SEQ ID NO: 969 - protein, 7 aa, Artificial Sequence
  Description of Artificial Sequence: Synthetic peptide
GTGTGGT

SEQ ID NO: 970 - protein, 7 aa, Artificial Sequence
  Description of Artificial Sequence: Synthetic peptide
GTGGTGT

SEQ ID NO: 971 - protein, 7 aa, Artificial Sequence
  Description of Artificial Sequence: Synthetic peptide
GGTTTGG

SEQ ID NO: 972 - protein, 7 aa, Artificial Sequence
  Description of Artificial Sequence: Synthetic peptide
GGTTGTG

SEQ ID NO: 973 - protein, 7 aa, Artificial Sequence
  Description of Artificial Sequence: Synthetic peptide
GGTTGGT

SEQ ID NO: 974 - protein, 7 aa, Artificial Sequence
  Description of Artificial Sequence: Synthetic peptide
GGTGTTG

SEQ ID NO: 975 - protein, 7 aa, Artificial Sequence
  Description of Artificial Sequence: Synthetic peptide
GGTGTGT

SEQ ID NO: 976 - protein, 7 aa, Artificial Sequence
  Description of Artificial Sequence: Synthetic peptide
GGTGGTT

SEQ ID NO: 977 - protein, 7 aa, Artificial Sequence
  Description of Artificial Sequence: Synthetic peptide
GGGTTTG

SEQ ID NO: 978 - protein, 7 aa, Artificial Sequence
  Description of Artificial Sequence: Synthetic peptide
GGGTTGT

SEQ ID NO: 979 - protein, 7 aa, Artificial Sequence
  Description of Artificial Sequence: Synthetic peptide
GGGTGTT

SEQ ID NO: 980 - protein, 7 aa, Artificial Sequence
  Description of Artificial Sequence: Synthetic peptide
GGGGGTT

SEQ ID NO: 981 - protein, 7 aa, Artificial Sequence
  Description of Artificial Sequence: Synthetic peptide
TTGGGGG

SEQ ID NO: 982 - protein, 7 aa, Artificial Sequence
  Description of Artificial Sequence: Synthetic peptide
TGTGGGG

SEQ ID NO: 983 - protein, 7 aa, Artificial Sequence
  Description of Artificial Sequence: Synthetic peptide
TGGTGGG

SEQ ID NO: 984 - protein, 7 aa, Artificial Sequence
  Description of Artificial Sequence: Synthetic peptide
TGGGTGG

SEQ ID NO: 985 - protein, 7 aa, Artificial Sequence
  Description of Artificial Sequence: Synthetic peptide
TGGGGTG

SEQ ID NO: 986 - protein, 7 aa, Artificial Sequence
  Description of Artificial Sequence: Synthetic peptide
TGGGGGT

SEQ ID NO: 987 - protein, 7 aa, Artificial Sequence
  Description of Artificial Sequence: Synthetic peptide
GTTGGGG

SEQ ID NO: 988 - protein, 7 aa, Artificial Sequence
  Description of Artificial Sequence: Synthetic peptide
GTGTGGG

SEQ ID NO: 989 - protein, 7 aa, Artificial Sequence
  Description of Artificial Sequence: Synthetic peptide
GTGGTGG

SEQ ID NO: 990 - protein, 7 aa, Artificial Sequence
  Description of Artificial Sequence: Synthetic peptide
GTGGGTG

SEQ ID NO: 991 - protein, 7 aa, Artificial Sequence
  Description of Artificial Sequence: Synthetic peptide
GTGGGGT

SEQ ID NO: 992 - protein, 7 aa, Artificial Sequence
  Description of Artificial Sequence: Synthetic peptide
GGTTGGG

SEQ ID NO: 993 - protein, 7 aa, Artificial Sequence
  Description of Artificial Sequence: Synthetic peptide
GGTGTGG

SEQ ID NO: 994 - protein, 7 aa, Artificial Sequence
  Description of Artificial Sequence: Synthetic peptide
GGTGGTG

SEQ ID NO: 995 - protein, 7 aa, Artificial Sequence
  Description of Artificial Sequence: Synthetic peptide
GGTGGGT

SEQ ID NO: 996 - protein, 7 aa, Artificial Sequence
  Description of Artificial Sequence: Synthetic peptide
GGGTTGG

SEQ ID NO: 997 - protein, 7 aa, Artificial Sequence
  Description of Artificial Sequence: Synthetic peptide
GGGTGTG

SEQ ID NO: 998 - protein, 7 aa, Artificial Sequence
  Description of Artificial Sequence: Synthetic peptide
GGGTGGT

SEQ ID NO: 999 - protein, 7 aa, Artificial Sequence
  Description of Artificial Sequence: Synthetic peptide
GGGGTTG

SEQ ID NO: 1000 - protein, 7 aa, Artificial Sequence
  Description of Artificial Sequence: Synthetic peptide
GGGGTGT

SEQ ID NO: 1001 - protein, 7 aa, Artificial Sequence
  Description of Artificial Sequence: Synthetic peptide
GGGGGGT

SEQ ID NO: 1002 - protein, 7 aa, Artificial Sequence
  Description of Artificial Sequence: Synthetic peptide
TGGGGGG

SEQ ID NO: 1003 - protein, 7 aa, Artificial Sequence
  Description of Artificial Sequence: Synthetic peptide
GTGGGGG

SEQ ID NO: 1004 - protein, 7 aa, Artificial Sequence
  Description of Artificial Sequence: Synthetic peptide
GGTGGGG

SEQ ID NO: 1005 - protein, 7 aa, Artificial Sequence
  Description of Artificial Sequence: Synthetic peptide
GGGTGGG

SEQ ID NO: 1006 - protein, 7 aa, Artificial Sequence
  Description of Artificial Sequence: Synthetic peptide
GGGGTGG

SEQ ID NO: 1007 - protein, 7 aa, Artificial Sequence
  Description of Artificial Sequence: Synthetic peptide
GGGGGTG

SEQ ID NO: 1008 - protein, 4 aa, Artificial Sequence
  Description of Artificial Sequence: Synthetic peptide
GGGA

SEQ ID NO: 1009 - protein, 4 aa, Artificial Sequence
  Description of Artificial Sequence: Synthetic peptide
AGGG

SEQ ID NO: 1010 - protein, 4 aa, Artificial Sequence
  Description of Artificial Sequence: Synthetic peptide
GAGG

SEQ ID NO: 1011 - protein, 4 aa, Artificial Sequence
  Description of Artificial Sequence: Synthetic peptide
GGAG

SEQ ID NO: 1012 - protein, 5 aa, Artificial Sequence
  Description of Artificial Sequence: Synthetic peptide
GGGGA

SEQ ID NO: 1013 - protein, 5 aa, Artificial Sequence
  Description of Artificial Sequence: Synthetic peptide
AGGGG

SEQ ID NO: 1014 - protein, 5 aa, Artificial Sequence
  Description of Artificial Sequence: Synthetic peptide
GAGGG

SEQ ID NO: 1015 - protein, 5 aa, Artificial Sequence
  Description of Artificial Sequence: Synthetic peptide
GGAGG

SEQ ID NO: 1016 - protein, 5 aa, Artificial Sequence
  Description of Artificial Sequence: Synthetic peptide
GGGAG

SEQ ID NO: 1017 - protein, 5 aa, Artificial Sequence
  Description of Artificial Sequence: Synthetic peptide
GGGAA

SEQ ID NO: 1018 - protein, 5 aa, Artificial Sequence
  Description of Artificial Sequence: Synthetic peptide
AAGGG

SEQ ID NO: 1019 - protein, 5 aa, Artificial Sequence
  Description of Artificial Sequence: Synthetic peptide
AGAGG

SEQ ID NO: 1020 - protein, 5 aa, Artificial Sequence
  Description of Artificial Sequence: Synthetic peptide
AGGAG

SEQ ID NO: 1021 - protein, 5 aa, Artificial Sequence
  Description of Artificial Sequence: Synthetic peptide
AGGGA

SEQ ID NO: 1022 - protein, 5 aa, Artificial Sequence
  Description of Artificial Sequence: Synthetic peptide
GAAGG

SEQ ID NO: 1023 - protein, 5 aa, Artificial Sequence
  Description of Artificial Sequence: Synthetic peptide
GAGAG

SEQ ID NO: 1024 - protein, 5 aa, Artificial Sequence
  Description of Artificial Sequence: Synthetic peptide
GAGGA

SEQ ID NO: 1025 - protein, 5 aa, Artificial Sequence
  Description of Artificial Sequence: Synthetic peptide
GGAAG

SEQ ID NO: 1026 - protein, 5 aa, Artificial Sequence
  Description of Artificial Sequence: Synthetic peptide
GGAGA

SEQ ID NO: 1027 - protein, 6 aa, Artificial Sequence
  Description of Artificial Sequence: Synthetic peptide
GGGGGA

SEQ ID NO: 1028 - protein, 6 aa, Artificial Sequence
  Description of Artificial Sequence: Synthetic peptide
AGGGGG

SEQ ID NO: 1029 - protein, 6 aa, Artificial Sequence
  Description of Artificial Sequence: Synthetic peptide
GAGGGG

SEQ ID NO: 1030 - protein, 6 aa, Artificial Sequence
  Description of Artificial Sequence: Synthetic peptide
GGAGGG

SEQ ID NO: 1031 - protein, 6 aa, Artificial Sequence
  Description of Artificial Sequence: Synthetic peptide
GGGAGG

SEQ ID NO: 1032 - protein, 6 aa, Artificial Sequence
  Description of Artificial Sequence: Synthetic peptide
GGGGAG

SEQ ID NO: 1033 - protein, 6 aa, Artificial Sequence
  Description of Artificial Sequence: Synthetic peptide
GGGGAA

SEQ ID NO: 1034 - protein, 6 aa, Artificial Sequence
  Description of Artificial Sequence: Synthetic peptide
AAGGGG

SEQ ID NO: 1035 - protein, 6 aa, Artificial Sequence
  Description of Artificial Sequence: Synthetic peptide
AGAGGG

SEQ ID NO: 1036 - protein, 6 aa, Artificial Sequence
  Description of Artificial Sequence: Synthetic peptide
AGGAGG

SEQ ID NO: 1037 - protein, 6 aa, Artificial Sequence
  Description of Artificial Sequence: Synthetic peptide
AGGGAG

SEQ ID NO: 1038 - protein, 6 aa, Artificial Sequence
  Description of Artificial Sequence: Synthetic peptide
AGGGGA

SEQ ID NO: 1039 - protein, 6 aa, Artificial Sequence
  Description of Artificial Sequence: Synthetic peptide
GAAGGG

SEQ ID NO: 1040 - protein, 6 aa, Artificial Sequence
  Description of Artificial Sequence: Synthetic peptide
GAGAGG

SEQ ID NO: 1041 - protein, 6 aa, Artificial Sequence
  Description of Artificial Sequence: Synthetic peptide
GAGGAG

SEQ ID NO: 1042 - protein, 6 aa, Artificial Sequence
  Description of Artificial Sequence: Synthetic peptide
GAGGGA

SEQ ID NO: 1043 - protein, 6 aa, Artificial Sequence
  Description of Artificial Sequence: Synthetic peptide
GGAAGG

SEQ ID NO: 1044 - protein, 6 aa, Artificial Sequence
  Description of Artificial Sequence: Synthetic peptide
GGAGAG

SEQ ID NO: 1045 - protein, 6 aa, Artificial Sequence
  Description of Artificial Sequence: Synthetic peptide
GGAGGA

SEQ ID NO: 1046 - protein, 6 aa, Artificial Sequence
  Description of Artificial Sequence: Synthetic peptide
GGGAAG

SEQ ID NO: 1047 - protein, 6 aa, Artificial Sequence
  Description of Artificial Sequence: Synthetic peptide
GGGAGA

SEQ ID NO: 1048 - protein, 7 aa, Artificial Sequence
  Description of Artificial Sequence: Synthetic peptide
GGGGAAA

SEQ ID NO: 1049 - protein, 7 aa, Artificial Sequence
  Description of Artificial Sequence: Synthetic peptide
AAAGGGG

SEQ ID NO: 1050 - protein, 7 aa, Artificial Sequence
  Description of Artificial Sequence: Synthetic peptide
AGAAGGG

SEQ ID NO: 1051 - protein, 7 aa, Artificial Sequence
  Description of Artificial Sequence: Synthetic peptide
AGAGAGG

SEQ ID NO: 1052 - protein, 7 aa, Artificial Sequence
  Description of Artificial Sequence: Synthetic peptide
AGAGGAG

SEQ ID NO: 1053 - protein, 7 aa, Artificial Sequence
  Description of Artificial Sequence: Synthetic peptide
AGAGGGA

SEQ ID NO: 1054 - protein, 7 aa, Artificial Sequence
  Description of Artificial Sequence: Synthetic peptide
AGGAAGG

SEQ ID NO: 1055 - protein, 7 aa, Artificial Sequence
  Description of Artificial Sequence: Synthetic peptide
AGGAGAG

SEQ ID NO: 1056 - protein, 7 aa, Artificial Sequence
  Description of Artificial Sequence: Synthetic peptide
AGGAGGA

SEQ ID NO: 1057 - protein, 7 aa, Artificial Sequence
  Description of Artificial Sequence: Synthetic peptide
AGGGAGA

SEQ ID NO: 1058 - protein, 7 aa, Artificial Sequence
  Description of Artificial Sequence: Synthetic peptide
AGGGAAG

SEQ ID NO: 1059 - protein, 7 aa, Artificial Sequence
  Description of Artificial Sequence: Synthetic peptide
AGGGGAA

SEQ ID NO: 1060 - protein, 7 aa, Artificial Sequence
  Description of Artificial Sequence: Synthetic peptide
AAGAGGG

SEQ ID NO: 1061 - protein, 7 aa, Artificial Sequence
  Description of Artificial Sequence: Synthetic peptide
AAGGAGG

SEQ ID NO: 1062 - protein, 7 aa, Artificial Sequence
  Description of Artificial Sequence: Synthetic peptide
AAGGGAG

SEQ ID NO: 1063 - protein, 7 aa, Artificial Sequence
  Description of Artificial Sequence: Synthetic peptide
AAGGGGA

SEQ ID NO: 1064 - protein, 7 aa, Artificial Sequence
  Description of Artificial Sequence: Synthetic peptide
GAAAGGG

SEQ ID NO: 1065 - protein, 7 aa, Artificial Sequence
  Description of Artificial Sequence: Synthetic peptide
GAAGAGG

SEQ ID NO: 1066 - protein, 7 aa, Artificial Sequence
  Description of Artificial Sequence: Synthetic peptide
GAAGGAG

SEQ ID NO: 1067 - protein, 7 aa, Artificial Sequence
  Description of Artificial Sequence: Synthetic peptide
GAAGGGA

SEQ ID NO: 1068 - protein, 7 aa, Artificial Sequence
  Description of Artificial Sequence: Synthetic peptide
GAGAAGG

SEQ ID NO: 1069 - protein, 7 aa, Artificial Sequence
  Description of Artificial Sequence: Synthetic peptide
GAGGAAG

SEQ ID NO: 1070 - protein, 7 aa, Artificial Sequence
  Description of Artificial Sequence: Synthetic peptide
GAGGGAA

SEQ ID NO: 1071 - protein, 7 aa, Artificial Sequence
  Description of Artificial Sequence: Synthetic peptide
GAGAGAG

SEQ ID NO: 1072 - protein, 7 aa, Artificial Sequence
  Description of Artificial Sequence: Synthetic peptide
GAGAGGA

SEQ ID NO: 1073 - protein, 7 aa, Artificial Sequence
  Description of Artificial Sequence: Synthetic peptide
GAGGAGA

SEQ ID NO: 1074 - protein, 7 aa, Artificial Sequence
  Description of Artificial Sequence: Synthetic peptide
GGAAAGG

SEQ ID NO: 1075 - protein, 7 aa, Artificial Sequence
  Description of Artificial Sequence: Synthetic peptide
GGAAGAG

SEQ ID NO: 1076 - protein, 7 aa, Artificial Sequence
  Description of Artificial Sequence: Synthetic peptide
GGAAGGA

SEQ ID NO: 1077 - protein, 7 aa, Artificial Sequence
  Description of Artificial Sequence: Synthetic peptide
GGAGAAG

SEQ ID NO: 1078 - protein, 7 aa, Artificial Sequence
  Description of Artificial Sequence: Synthetic peptide
GGAGAGA

SEQ ID NO: 1079 - protein, 7 aa, Artificial Sequence
  Description of Artificial Sequence: Synthetic peptide
GGAGGAA

SEQ ID NO: 1080 - protein, 7 aa, Artificial Sequence
  Description of Artificial Sequence: Synthetic peptide
GGGAAAG

SEQ ID NO: 1081 - protein, 7 aa, Artificial Sequence
  Description of Artificial Sequence: Synthetic peptide
GGGAAGA

SEQ ID NO: 1082 - protein, 7 aa, Artificial Sequence
  Description of Artificial Sequence: Synthetic peptide
GGGAGAA

SEQ ID NO: 1083 - protein, 7 aa, Artificial Sequence
  Description of Artificial Sequence: Synthetic peptide
GGGGGAA

SEQ ID NO: 1084 - protein, 7 aa, Artificial Sequence
  Description of Artificial Sequence: Synthetic peptide
AAGGGGG

SEQ ID NO: 1085 - protein, 7 aa, Artificial Sequence
  Description of Artificial Sequence: Synthetic peptide
AGAGGGG

SEQ ID NO: 1086 - protein, 7 aa, Artificial Sequence
  Description of Artificial Sequence: Synthetic peptide
AGGAGGG

SEQ ID NO: 1087 - protein, 7 aa, Artificial Sequence
  Description of Artificial Sequence: Synthetic peptide
AGGGAGG

SEQ ID NO: 1088 - protein, 7 aa, Artificial Sequence
  Description of Artificial Sequence: Synthetic peptide
AGGGGAG

SEQ ID NO: 1089 - protein, 7 aa, Artificial Sequence
  Description of Artificial Sequence: Synthetic peptide
AGGGGGA

SEQ ID NO: 1090 - protein, 7 aa, Artificial Sequence
  Description of Artificial Sequence: Synthetic peptide
GAAGGGG

SEQ ID NO: 1091 - protein, 7 aa, Artificial Sequence
  Description of Artificial Sequence: Synthetic peptide
GAGAGGG

SEQ ID NO: 1092 - protein, 7 aa, Artificial Sequence
  Description of Artificial Sequence: Synthetic peptide
GAGGAGG

SEQ ID NO: 1093 - protein, 7 aa, Artificial Sequence
  Description of Artificial Sequence: Synthetic peptide
GAGGGAG

SEQ ID NO: 1094 - protein, 7 aa, Artificial Sequence
  Description of Artificial Sequence: Synthetic peptide
GAGGGGA

SEQ ID NO: 1095 - protein, 7 aa, Artificial Sequence
  Description of Artificial Sequence: Synthetic peptide
GGAAGGG

SEQ ID NO: 1096 - protein, 7 aa, Artificial Sequence
  Description of Artificial Sequence: Synthetic peptide
GGAGAGG

SEQ ID NO: 1097 - protein, 7 aa, Artificial Sequence
  Description of Artificial Sequence: Synthetic peptide
GGAGGAG

SEQ ID NO: 1098 - protein, 7 aa, Artificial Sequence
  Description of Artificial Sequence: Synthetic peptide
GGAGGGA

SEQ ID NO: 1099 - protein, 7 aa, Artificial Sequence
  Description of Artificial Sequence: Synthetic peptide
GGGAAGG

SEQ ID NO: 1100 - protein, 7 aa, Artificial Sequence
  Description of Artificial Sequence: Synthetic peptide
GGGAGAG

SEQ ID NO: 1101 - protein, 7 aa, Artificial Sequence
  Description of Artificial Sequence: Synthetic peptide
GGGAGGA

SEQ ID NO: 1102 - protein, 7 aa, Artificial Sequence
  Description of Artificial Sequence: Synthetic peptide
GGGGAAG

SEQ ID NO: 1103 - protein, 7 aa, Artificial Sequence
  Description of Artificial Sequence: Synthetic peptide
GGGGAGA

SEQ ID NO: 1104 - protein, 7 aa, Artificial Sequence
  Description of Artificial Sequence: Synthetic peptide
GGGGGGA

SEQ ID NO: 1105 - protein, 7 aa, Artificial Sequence
  Description of Artificial Sequence: Synthetic peptide
AGGGGGG

SEQ ID NO: 1106 - protein, 7 aa, Artificial Sequence
  Description of Artificial Sequence: Synthetic peptide
GAGGGGG

SEQ ID NO: 1107 - protein, 7 aa, Artificial Sequence
  Description of Artificial Sequence: Synthetic peptide
GGAGGGG

SEQ ID NO: 1108 - protein, 7 aa, Artificial Sequence
  Description of Artificial Sequence: Synthetic peptide
GGGAGGG

SEQ ID NO: 1109 - protein, 7 aa, Artificial Sequence
  Description of Artificial Sequence: Synthetic peptide
GGGGAGG

SEQ ID NO: 1110 - protein, 7 aa, Artificial Sequence
  Description of Artificial Sequence: Synthetic peptide
GGGGGAG

SEQ ID NO: 1111 - protein, 4 aa, Artificial Sequence
  Description of Artificial Sequence: Synthetic peptide
GGGS

SEQ ID NO: 1112 - protein, 4 aa, Artificial Sequence
  Description of Artificial Sequence: Synthetic peptide
SGGG

SEQ ID NO: 1113 - protein, 4 aa, Artificial Sequence
  Description of Artificial Sequence: Synthetic peptide
GSGG

SEQ ID NO: 1114 - protein, 4 aa, Artificial Sequence
  Description of Artificial Sequence: Synthetic peptide
GGSG

SEQ ID NO: 1115 - protein, 5 aa, Artificial Sequence
  Description of Artificial Sequence: Synthetic peptide
GGGGS

SEQ ID NO: 1116 - protein, 5 aa, Artificial Sequence
  Description of Artificial Sequence: Synthetic peptide
SGGGG

SEQ ID NO: 1117 - protein, 5 aa, Artificial Sequence
  Description of Artificial Sequence: Synthetic peptide
GSGGG

SEQ ID NO: 1118 - protein, 5 aa, Artificial Sequence
  Description of Artificial Sequence: Synthetic peptide
GGSGG

SEQ ID NO: 1119 - protein, 5 aa, Artificial Sequence
  Description of Artificial Sequence: Synthetic peptide
GGGSG

SEQ ID NO: 1120 - protein, 5 aa, Artificial Sequence
  Description of Artificial Sequence: Synthetic peptide
GGGSS

SEQ ID NO: 1121 - protein, 5 aa, Artificial Sequence
  Description of Artificial Sequence: Synthetic peptide
SSGGG

SEQ ID NO: 1122 - protein, 5 aa, Artificial Sequence
  Description of Artificial Sequence: Synthetic peptide
SGSGG

SEQ ID NO: 1123 - protein, 5 aa, Artificial Sequence
  Description of Artificial Sequence: Synthetic peptide
SGGSG

SEQ ID NO: 1124 - protein, 5 aa, Artificial Sequence
  Description of Artificial Sequence: Synthetic peptide
SGGGS

SEQ ID NO: 1125 - protein, 5 aa, Artificial Sequence
  Description of Artificial Sequence: Synthetic peptide
GSSGG

SEQ ID NO: 1126 - protein, 5 aa, Artificial Sequence
  Description of Artificial Sequence: Synthetic peptide
GSGSG

SEQ ID NO: 1127 - protein, 5 aa, Artificial Sequence
  Description of Artificial Sequence: Synthetic peptide
GSGGS

SEQ ID NO: 1128 - protein, 5 aa, Artificial Sequence
  Description of Artificial Sequence: Synthetic peptide
GGSSG

SEQ ID NO: 1129 - protein, 5 aa, Artificial Sequence
  Description of Artificial Sequence: Synthetic peptide
GGSGS

SEQ ID NO: 1130 - protein, 6 aa, Artificial Sequence
  Description of Artificial Sequence: Synthetic peptide
GGGGGS

SEQ ID NO: 1131 - protein, 6 aa, Artificial Sequence
  Description of Artificial Sequence: Synthetic peptide
SGGGGG

SEQ ID NO: 1132 - protein, 6 aa, Artificial Sequence
  Description of Artificial Sequence: Synthetic peptide
GSGGGG

SEQ ID NO: 1133 - protein, 6 aa, Artificial Sequence
  Description of Artificial Sequence: Synthetic peptide
GGSGGG

SEQ ID NO: 1134 - protein, 6 aa, Artificial Sequence
  Description of Artificial Sequence: Synthetic peptide
GGGSGG

SEQ ID NO: 1135 - protein, 6 aa, Artificial Sequence
  Description of Artificial Sequence: Synthetic peptide
GGGGSG

SEQ ID NO: 1136 - protein, 6 aa, Artificial Sequence
  Description of Artificial Sequence: Synthetic peptide
GGGGSS

SEQ ID NO: 1137 - protein, 6 aa, Artificial Sequence
  Description of Artificial Sequence: Synthetic peptide
SSGGGG

SEQ ID NO: 1138 - protein, 6 aa, Artificial Sequence
  Description of Artificial Sequence: Synthetic peptide
SGSGGG

SEQ ID NO: 1139 - protein, 6 aa, Artificial Sequence
  Description of Artificial Sequence: Synthetic peptide
SGGSGG

SEQ ID NO: 1140 - protein, 6 aa, Artificial Sequence
  Description of Artificial Sequence: Synthetic peptide
SGGGSG

SEQ ID NO: 1141 - protein, 6 aa, Artificial Sequence
  Description of Artificial Sequence: Synthetic peptide
SGGGGS

SEQ ID NO: 1142 - protein, 6 aa, Artificial Sequence
  Description of Artificial Sequence: Synthetic peptide
GSSGGG

SEQ ID NO: 1143 - protein, 6 aa, Artificial Sequence
  Description of Artificial Sequence: Synthetic peptide
GSGSGG

SEQ ID NO: 1144 - protein, 6 aa, Artificial Sequence
  Description of Artificial Sequence: Synthetic peptide
GSGGSG

SEQ ID NO: 1145 - protein, 6 aa, Artificial Sequence
  Description of Artificial Sequence: Synthetic peptide
GSGGGS

SEQ ID NO: 1146 - protein, 6 aa, Artificial Sequence
  Description of Artificial Sequence: Synthetic peptide
GGSSGG

SEQ ID NO: 1147 - protein, 6 aa, Artificial Sequence
  Description of Artificial Sequence: Synthetic peptide
GGSGSG

SEQ ID NO: 1148 - protein, 6 aa, Artificial Sequence
  Description of Artificial Sequence: Synthetic peptide
GGSGGS

SEQ ID NO: 1149 - protein, 6 aa, Artificial Sequence
  Description of Artificial Sequence: Synthetic peptide
GGGSSG

SEQ ID NO: 1150 - protein, 6 aa, Artificial Sequence
  Description of Artificial Sequence: Synthetic peptide
GGGSGS

SEQ ID NO: 1151 - protein, 7 aa, Artificial Sequence
  Description of Artificial Sequence: Synthetic peptide
GGGGSSS

SEQ ID NO: 1152 - protein, 7 aa, Artificial Sequence
  Description of Artificial Sequence: Synthetic peptide
SSSGGGG

SEQ ID NO: 1153 - protein, 7 aa, Artificial Sequence
  Description of Artificial Sequence: Synthetic peptide
SGSSGGG

SEQ ID NO: 1154 - protein, 7 aa, Artificial Sequence
  Description of Artificial Sequence: Synthetic peptide
SGSGSGG

SEQ ID NO: 1155 - protein, 7 aa, Artificial Sequence
  Description of Artificial Sequence: Synthetic peptide
SGSGGSG

SEQ ID NO: 1156 - protein, 7 aa, Artificial Sequence
  Description of Artificial Sequence: Synthetic peptide
SGSGGGS

SEQ ID NO: 1157 - protein, 7 aa, Artificial Sequence
  Description of Artificial Sequence: Synthetic peptide
SGGSSGG

SEQ ID NO: 1158 - protein, 7 aa, Artificial Sequence
  Description of Artificial Sequence: Synthetic peptide
SGGSGSG

SEQ ID NO: 1159 - protein, 7 aa, Artificial Sequence
  Description of Artificial Sequence: Synthetic peptide
SGGSGGS

SEQ ID NO: 1160 - protein, 7 aa, Artificial Sequence
  Description of Artificial Sequence: Synthetic peptide
SGGGSGS

SEQ ID NO: 1161 - protein, 7 aa, Artificial Sequence
  Description of Artificial Sequence: Synthetic peptide
SGGGSSG

SEQ ID NO: 1162 - protein, 7 aa, Artificial Sequence
  Description of Artificial Sequence: Synthetic peptide
SGGGGSS

SEQ ID NO: 1163 - protein, 7 aa, Artificial Sequence
  Description of Artificial Sequence: Synthetic peptide
SSGSGGG

SEQ ID NO: 1164 - protein, 7 aa, Artificial Sequence
  Description of Artificial Sequence: Synthetic peptide
SSGGSGG

SEQ ID NO: 1165 - protein, 7 aa, Artificial Sequence
  Description of Artificial Sequence: Synthetic peptide
SSGGGSG

SEQ ID NO: 1166 - protein, 7 aa, Artificial Sequence
  Description of Artificial Sequence: Synthetic peptide
SSGGGGS

SEQ ID NO: 1167 - protein, 7 aa, Artificial Sequence
  Description of Artificial Sequence: Synthetic peptide
GSSSGGG

SEQ ID NO: 1168 - protein, 7 aa, Artificial Sequence
  Description of Artificial Sequence: Synthetic peptide
GSSGSGG

SEQ ID NO: 1169 - protein, 7 aa, Artificial Sequence
  Description of Artificial Sequence: Synthetic peptide
GSSGGSG

SEQ ID NO: 1170 - protein, 7 aa, Artificial Sequence
  Description of Artificial Sequence: Synthetic peptide
GSSGGGS

SEQ ID NO: 1171 - protein, 7 aa, Artificial Sequence
  Description of Artificial Sequence: Synthetic peptide
GSGSSGG

SEQ ID NO: 1172 - protein, 7 aa, Artificial Sequence
  Description of Artificial Sequence: Synthetic peptide
GSGGSSG

SEQ ID NO: 1173 - protein, 7 aa, Artificial Sequence
  Description of Artificial Sequence: Synthetic peptide
GSGGGSS

SEQ ID NO: 1174 - protein, 7 aa, Artificial Sequence
  Description of Artificial Sequence: Synthetic peptide
GSGSGSG

SEQ ID NO: 1175 - protein, 7 aa, Artificial Sequence
  Description of Artificial Sequence: Synthetic peptide
GSGSGGS

SEQ ID NO: 1176 - protein, 7 aa, Artificial Sequence
  Description of Artificial Sequence: Synthetic peptide
GSGGSGS

SEQ ID NO: 1177 - protein, 7 aa, Artificial Sequence
  Description of Artificial Sequence: Synthetic peptide
GGSSSGG

SEQ ID NO: 1178 - protein, 7 aa, Artificial Sequence
  Description of Artificial Sequence: Synthetic peptide
GGSSGSG

SEQ ID NO: 1179 - protein, 7 aa, Artificial Sequence
  Description of Artificial Sequence: Synthetic peptide
GGSSGGS

SEQ ID NO: 1180 - protein, 7 aa, Artificial Sequence
  Description of Artificial Sequence: Synthetic peptide
GGSGSSG

SEQ ID NO: 1181 - protein, 7 aa, Artificial Sequence
  Description of Artificial Sequence: Synthetic peptide
GGSGSGS

SEQ ID NO: 1182 - protein, 7 aa, Artificial Sequence
  Description of Artificial Sequence: Synthetic peptide
GGSGGSS

SEQ ID NO: 1183 - protein, 7 aa, Artificial Sequence
  Description of Artificial Sequence: Synthetic peptide
GGGSSSG

SEQ ID NO: 1184 - protein, 7 aa, Artificial Sequence
  Description of Artificial Sequence: Synthetic peptide
GGGSSGS

SEQ ID NO: 1185 - protein, 7 aa, Artificial Sequence
  Description of Artificial Sequence: Synthetic peptide
GGGSGSS

SEQ ID NO: 1186 - protein, 7 aa, Artificial Sequence
  Description of Artificial Sequence: Synthetic peptide
GGGGGSS

SEQ ID NO: 1187 - protein, 7 aa, Artificial Sequence
  Description of Artificial Sequence: Synthetic peptide
SSGGGGG

SEQ ID NO: 1188 - protein, 7 aa, Artificial Sequence
  Description of Artificial Sequence: Synthetic peptide
SGSGGGG

SEQ ID NO: 1189 - protein, 7 aa, Artificial Sequence
  Description of Artificial Sequence: Synthetic peptide
SGGSGGG

SEQ ID NO: 1190 - protein, 7 aa, Artificial Sequence
  Description of Artificial Sequence: Synthetic peptide
SGGGSGG

SEQ ID NO: 1191 - protein, 7 aa, Artificial Sequence
  Description of Artificial Sequence: Synthetic peptide
SGGGGSG

SEQ ID NO: 1192 - protein, 7 aa, Artificial Sequence
  Description of Artificial Sequence: Synthetic peptide
SGGGGGS

SEQ ID NO: 1193 - protein, 7 aa, Artificial Sequence
  Description of Artificial Sequence: Synthetic peptide
GSSGGGG

SEQ ID NO: 1194 - protein, 7 aa, Artificial Sequence
  Description of Artificial Sequence: Synthetic peptide
GSGSGGG

SEQ ID NO: 1195 - protein, 7 aa, Artificial Sequence
  Description of Artificial Sequence: Synthetic peptide
GSGGSGG

SEQ ID NO: 1196 - protein, 7 aa, Artificial Sequence
  Description of Artificial Sequence: Synthetic peptide
GSGGGSG

SEQ ID NO: 1197 - protein, 7 aa, Artificial Sequence
  Description of Artificial Sequence: Synthetic peptide
GSGGGGS

SEQ ID NO: 1198 - protein, 7 aa, Artificial Sequence
  Description of Artificial Sequence: Synthetic peptide
GGSSGGG

SEQ ID NO: 1199 - protein, 7 aa, Artificial Sequence
  Description of Artificial Sequence: Synthetic peptide
GGSGSGG

SEQ ID NO: 1200 - protein, 7 aa, Artificial Sequence
  Description of Artificial Sequence: Synthetic peptide
GGSGGSG

SEQ ID NO: 1201 - protein, 7 aa, Artificial Sequence
  Description of Artificial Sequence: Synthetic peptide
GGSGGGS

SEQ ID NO: 1202 - protein, 7 aa, Artificial Sequence
  Description of Artificial Sequence: Synthetic peptide
GGGSSGG

SEQ ID NO: 1203 - protein, 7 aa, Artificial Sequence
  Description of Artificial Sequence: Synthetic peptide
GGGSGSG

SEQ ID NO: 1204 - protein, 7 aa, Artificial Sequence
  Description of Artificial Sequence: Synthetic peptide
GGGSGGS

SEQ ID NO: 1205 - protein, 7 aa, Artificial Sequence
  Description of Artificial Sequence: Synthetic peptide
GGGGSSG

SEQ ID NO: 1206 - protein, 7 aa, Artificial Sequence
  Description of Artificial Sequence: Synthetic peptide
GGGGSGS

SEQ ID NO: 1207 - protein, 7 aa, Artificial Sequence
  Description of Artificial Sequence: Synthetic peptide
GGGGGGS

SEQ ID NO: 1208 - protein, 7 aa, Artificial Sequence
  Description of Artificial Sequence: Synthetic peptide
SGGGGGG

SEQ ID NO: 1209 - protein, 7 aa, Artificial Sequence
  Description of Artificial Sequence: Synthetic peptide
GSGGGGG

SEQ ID NO: 1210 - protein, 7 aa, Artificial Sequence
  Description of Artificial Sequence: Synthetic peptide
GGSGGGG

SEQ ID NO: 1211 - protein, 7 aa, Artificial Sequence
  Description of Artificial Sequence: Synthetic peptide
GGGSGGG

SEQ ID NO: 1212 - protein, 7 aa, Artificial Sequence
  Description of Artificial Sequence: Synthetic peptide
GGGGSGG

SEQ ID NO: 1213 - protein, 7 aa, Artificial Sequence
  Description of Artificial Sequence: Synthetic peptide
GGGGGSG

SEQ ID NO: 1214 - protein, 4 aa, Artificial Sequence
  Description of Artificial Sequence: Synthetic peptide
GGGQ

SEQ ID NO: 1215 - protein, 4 aa, Artificial Sequence
  Description of Artificial Sequence: Synthetic peptide
QGGG

SEQ ID NO: 1216 - protein, 4 aa, Artificial Sequence
  Description of Artificial Sequence: Synthetic peptide
GQGG

SEQ ID NO: 1217 - protein, 4 aa, Artificial Sequence
  Description of Artificial Sequence: Synthetic peptide
GGQG

SEQ ID NO: 1218 - protein, 5 aa, Artificial Sequence
  Description of Artificial Sequence: Synthetic peptide
GGGGQ

SEQ ID NO: 1219 - protein, 5 aa, Artificial Sequence
  Description of Artificial Sequence: Synthetic peptide
QGGGG

SEQ ID NO: 1220 - protein, 5 aa, Artificial Sequence
  Description of Artificial Sequence: Synthetic peptide
GQGGG

SEQ ID NO: 1221 - protein, 5 aa, Artificial Sequence
  Description of Artificial Sequence: Synthetic peptide
GGQGG

SEQ ID NO: 1222 - protein, 5 aa, Artificial Sequence
  Description of Artificial Sequence: Synthetic peptide
GGGQG

SEQ ID NO: 1223 - protein, 5 aa, Artificial Sequence
  Description of Artificial Sequence: Synthetic peptide
GGGQQ

SEQ ID NO: 1224 - protein, 5 aa, Artificial Sequence
  Description of Artificial Sequence: Synthetic peptide
QQGGG

SEQ ID NO: 1225 - protein, 5 aa, Artificial Sequence
  Description of Artificial Sequence: Synthetic peptide
QGQGG

SEQ ID NO: 1226 - protein, 5 aa, Artificial Sequence
  Description of Artificial Sequence: Synthetic peptide
QGGQG

SEQ ID NO: 1227 - protein, 5 aa, Artificial Sequence
  Description of Artificial Sequence: Synthetic peptide
QGGGQ

SEQ ID NO: 1228 - protein, 5 aa, Artificial Sequence
  Description of Artificial Sequence: Synthetic peptide
GQQGG

SEQ ID NO: 1229 - protein, 5 aa, Artificial Sequence
  Description of Artificial Sequence: Synthetic peptide
GQGQG

SEQ ID NO: 1230 - protein, 5 aa, Artificial Sequence
  Description of Artificial Sequence: Synthetic peptide
GQGGQ

SEQ ID NO: 1231 - protein, 5 aa, Artificial Sequence
  Description of Artificial Sequence: Synthetic peptide
GGQQG

SEQ ID NO: 1232 - protein, 5 aa, Artificial Sequence
  Description of Artificial Sequence: Synthetic peptide
GGQGQ

SEQ ID NO: 1233 - protein, 6 aa, Artificial Sequence
  Description of Artificial Sequence: Synthetic peptide
GGGGGQ

SEQ ID NO: 1234 - protein, 6 aa, Artificial Sequence
  Description of Artificial Sequence: Synthetic peptide
QGGGGG

SEQ ID NO: 1235 - protein, 6 aa, Artificial Sequence
  Description of Artificial Sequence: Synthetic peptide
GQGGGG

SEQ ID NO: 1236 - protein, 6 aa, Artificial Sequence
  Description of Artificial Sequence: Synthetic peptide
GGQGGG

SEQ ID NO: 1237 - protein, 6 aa, Artificial Sequence
  Description of Artificial Sequence: Synthetic peptide
GGGQGG

SEQ ID NO: 1238 - protein, 6 aa, Artificial Sequence
  Description of Artificial Sequence: Synthetic peptide
GGGGQG

SEQ ID NO: 1239 - protein, 6 aa, Artificial Sequence
  Description of Artificial Sequence: Synthetic peptide
GGGGQQ

SEQ ID NO: 1240 - protein, 6 aa, Artificial Sequence
  Description of Artificial Sequence: Synthetic peptide
QQGGGG

SEQ ID NO: 1241 - protein, 6 aa, Artificial Sequence
  Description of Artificial Sequence: Synthetic peptide
QGQGGG

SEQ ID NO: 1242 - protein, 6 aa, Artificial Sequence
  Description of Artificial Sequence: Synthetic peptide
QGGQGG

SEQ ID NO: 1243 - protein, 6 aa, Artificial Sequence
  Description of Artificial Sequence: Synthetic peptide
QGGGQG

SEQ ID NO: 1244 - protein, 6 aa, Artificial Sequence
  Description of Artificial Sequence: Synthetic peptide
QGGGGQ

SEQ ID NO: 1245 - protein, 6 aa, Artificial Sequence
  Description of Artificial Sequence: Synthetic peptide
GQQGGG

SEQ ID NO: 1246 - protein, 6 aa, Artificial Sequence
  Description of Artificial Sequence: Synthetic peptide
GQGQGG

SEQ ID NO: 1247 - protein, 6 aa, Artificial Sequence
  Description of Artificial Sequence: Synthetic peptide
GQGGQG

SEQ ID NO: 1248 - protein, 6 aa, Artificial Sequence
  Description of Artificial Sequence: Synthetic peptide
GQGGGQ

SEQ ID NO: 1249 - protein, 6 aa, Artificial Sequence
  Description of Artificial Sequence: Synthetic peptide
GGQQGG

SEQ ID NO: 1250 - protein, 6 aa, Artificial Sequence
  Description of Artificial Sequence: Synthetic peptide
GGQGQG

SEQ ID NO: 1251 - protein, 6 aa, Artificial Sequence
  Description of Artificial Sequence: Synthetic peptide
GGQGGQ

SEQ ID NO: 1252 - protein, 6 aa, Artificial Sequence
  Description of Artificial Sequence: Synthetic peptide
GGGQQG

SEQ ID NO: 1253 - protein, 6 aa, Artificial Sequence
  Description of Artificial Sequence: Synthetic peptide
GGGQGQ

SEQ ID NO: 1254 - protein, 7 aa, Artificial Sequence
  Description of Artificial Sequence: Synthetic peptide
GGGGQQQ

SEQ ID NO: 1255 - protein, 7 aa, Artificial Sequence
  Description of Artificial Sequence: Synthetic peptide
QQQGGGG

SEQ ID NO: 1256 - protein, 7 aa, Artificial Sequence
  Description of Artificial Sequence: Synthetic peptide
QGQQGGG

SEQ ID NO: 1257 - protein, 7 aa, Artificial Sequence
  Description of Artificial Sequence: Synthetic peptide
QGQGQGG

SEQ ID NO: 1258 - protein, 7 aa, Artificial Sequence
  Description of Artificial Sequence: Synthetic peptide
QGQGGQG

SEQ ID NO: 1259 - protein, 7 aa, Artificial Sequence
  Description of Artificial Sequence: Synthetic peptide
QGQGGGQ

SEQ ID NO: 1260 - protein, 7 aa, Artificial Sequence
  Description of Artificial Sequence: Synthetic peptide
QGGQQGG

SEQ ID NO: 1261 - protein, 7 aa, Artificial Sequence
  Description of Artificial Sequence: Synthetic peptide
QGGQGQG

SEQ ID NO: 1262 - protein, 7 aa, Artificial Sequence
  Description of Artificial Sequence: Synthetic peptide
QGGQGGQ

SEQ ID NO: 1263 - protein, 7 aa, Artificial Sequence
  Description of Artificial Sequence: Synthetic peptide
QGGGQGQ

SEQ ID NO: 1264 - protein, 7 aa, Artificial Sequence
  Description of Artificial Sequence: Synthetic peptide
QGGGQQG

SEQ ID NO: 1265 - protein, 7 aa, Artificial Sequence
  Description of Artificial Sequence: Synthetic peptide
QGGGGQQ

SEQ ID NO: 1266 - protein, 7 aa, Artificial Sequence
  Description of Artificial Sequence: Synthetic peptide
QQGQGGG

SEQ ID NO: 1267 - protein, 7 aa, Artificial Sequence
  Description of Artificial Sequence: Synthetic peptide
QQGGQGG

SEQ ID NO: 1268 - protein, 7 aa, Artificial Sequence
  Description of Artificial Sequence: Synthetic peptide
QQGGGQG

SEQ ID NO: 1269 - protein, 7 aa, Artificial Sequence
  Description of Artificial Sequence: Synthetic peptide
QQGGGGQ

SEQ ID NO: 1270 - protein, 7 aa, Artificial Sequence
  Description of Artificial Sequence: Synthetic peptide
GQQQGGG

SEQ ID NO: 1271 - protein, 7 aa, Artificial Sequence
  Description of Artificial Sequence: Synthetic peptide
GQQGQGG

SEQ ID NO: 1272 - protein, 7 aa, Artificial Sequence
  Description of Artificial Sequence: Synthetic peptide
GQQGGQG

SEQ ID NO: 1273 - protein, 7 aa, Artificial Sequence
  Description of Artificial Sequence: Synthetic peptide
GQQGGGQ

SEQ ID NO: 1274 - protein, 7 aa, Artificial Sequence
  Description of Artificial Sequence: Synthetic peptide
GQGQQGG

SEQ ID NO: 1275 - protein, 7 aa, Artificial Sequence
  Description of Artificial Sequence: Synthetic peptide
GQGGQQG

SEQ ID NO: 1276 - protein, 7 aa, Artificial Sequence
  Description of Artificial Sequence: Synthetic peptide
GQGGGQQ

SEQ ID NO: 1277 - protein, 7 aa, Artificial Sequence
  Description of Artificial Sequence: Synthetic peptide
GQGQGQG

SEQ ID NO: 1278 - protein, 7 aa, Artificial Sequence
  Description of Artificial Sequence: Synthetic peptide
GQGQGGQ

SEQ ID NO: 1279 - protein, 7 aa, Artificial Sequence
  Description of Artificial Sequence: Synthetic peptide
GQGGQGQ

SEQ ID NO: 1280 - protein, 7 aa, Artificial Sequence
  Description of Artificial Sequence: Synthetic peptide
GGQQQGG

SEQ ID NO: 1281 - protein, 7 aa, Artificial Sequence
  Description of Artificial Sequence: Synthetic peptide
GGQQGQG

SEQ ID NO: 1282 - protein, 7 aa, Artificial Sequence
  Description of Artificial Sequence: Synthetic peptide
GGQQGGQ

SEQ ID NO: 1283 - protein, 7 aa, Artificial Sequence
  Description of Artificial Sequence: Synthetic peptide
GGQGQQG

SEQ ID NO: 1284 - protein, 7 aa, Artificial Sequence
  Description of Artificial Sequence: Synthetic peptide
GGQGQGQ

SEQ ID NO: 1285 - protein, 7 aa, Artificial Sequence
  Description of Artificial Sequence: Synthetic peptide
GGQGGQQ

SEQ ID NO: 1286 - protein, 7 aa, Artificial Sequence
  Description of Artificial Sequence: Synthetic peptide
GGGQQQG

SEQ ID NO: 1287 - protein, 7 aa, Artificial Sequence
  Description of Artificial Sequence: Synthetic peptide
GGGQQGQ

SEQ ID NO: 1288 - protein, 7 aa, Artificial Sequence
  Description of Artificial Sequence: Synthetic peptide
GGGQGQQ

SEQ ID NO: 1289 - protein, 7 aa, Artificial Sequence
  Description of Artificial Sequence: Synthetic peptide
GGGGGQQ

SEQ ID NO: 1290 - protein, 7 aa, Artificial Sequence
  Description of Artificial Sequence: Synthetic peptide
QQGGGGG

SEQ ID NO: 1291 - protein, 7 aa, Artificial Sequence
  Description of Artificial Sequence: Synthetic peptide
QGQGGGG

SEQ ID NO: 1292 - protein, 7 aa, Artificial Sequence
  Description of Artificial Sequence: Synthetic peptide
QGGQGGG

SEQ ID NO: 1293 - protein, 7 aa, Artificial Sequence
  Description of Artificial Sequence: Synthetic peptide
QGGGQGG

SEQ ID NO: 1294 - protein, 7 aa, Artificial Sequence
  Description of Artificial Sequence: Synthetic peptide
QGGGGQG

SEQ ID NO: 1295 - protein, 7 aa, Artificial Sequence
  Description of Artificial Sequence: Synthetic peptide
QGGGGGQ

SEQ ID NO: 1296 - protein, 7 aa, Artificial Sequence
  Description of Artificial Sequence: Synthetic peptide
GQQGGGG

SEQ ID NO: 1297 - protein, 7 aa, Artificial Sequence
  Description of Artificial Sequence: Synthetic peptide
GQGQGGG

SEQ ID NO: 1298 - protein, 7 aa, Artificial Sequence
  Description of Artificial Sequence: Synthetic peptide
GQGGQGG

SEQ ID NO: 1299 - protein, 7 aa, Artificial Sequence
  Description of Artificial Sequence: Synthetic peptide
GQGGGQG

SEQ ID NO: 1300 - protein, 7 aa, Artificial Sequence
  Description of Artificial Sequence: Synthetic peptide
GQGGGGQ

SEQ ID NO: 1301 - protein, 7 aa, Artificial Sequence
  Description of Artificial Sequence: Synthetic peptide
GGQQGGG

SEQ ID NO: 1302 - protein, 7 aa, Artificial Sequence
  Description of Artificial Sequence: Synthetic peptide
GGQGQGG

SEQ ID NO: 1303 - protein, 7 aa, Artificial Sequence
  Description of Artificial Sequence: Synthetic peptide
GGQGGQG

SEQ ID NO: 1304 - protein, 7 aa, Artificial Sequence
  Description of Artificial Sequence: Synthetic peptide
GGQGGGQ

SEQ ID NO: 1305 - protein, 7 aa, Artificial Sequence
  Description of Artificial Sequence: Synthetic peptide
GGGQQGG

SEQ ID NO: 1306 - protein, 7 aa, Artificial Sequence
  Description of Artificial Sequence: Synthetic peptide
GGGQGQG

SEQ ID NO: 1307 - protein, 7 aa, Artificial Sequence
  Description of Artificial Sequence: Synthetic peptide
GGGQGGQ

SEQ ID NO: 1308 - protein, 7 aa, Artificial Sequence
  Description of Artificial Sequence: Synthetic peptide
GGGGQQG

SEQ ID NO: 1309 - protein, 7 aa, Artificial Sequence
  Description of Artificial Sequence: Synthetic peptide
GGGGQGQ

SEQ ID NO: 1310 - protein, 7 aa, Artificial Sequence
  Description of Artificial Sequence: Synthetic peptide
GGGGGGQ

SEQ ID NO: 1311 - protein, 7 aa, Artificial Sequence
  Description of Artificial Sequence: Synthetic peptide
QGGGGGG

SEQ ID NO: 1312 - protein, 7 aa, Artificial Sequence
  Description of Artificial Sequence: Synthetic peptide
GQGGGGG

SEQ ID NO: 1313 - protein, 7 aa, Artificial Sequence
  Description of Artificial Sequence: Synthetic peptide
GGQGGGG

SEQ ID NO: 1314 - protein, 7 aa, Artificial Sequence
  Description of Artificial Sequence: Synthetic peptide
GGGQGGG

SEQ ID NO: 1315 - protein, 7 aa, Artificial Sequence
  Description of Artificial Sequence: Synthetic peptide
GGGGQGG

SEQ ID NO: 1316 - protein, 7 aa, Artificial Sequence
  Description of Artificial Sequence: Synthetic peptide
GGGGGQG

SEQ ID NO: 1317 - protein, 4 aa, Artificial Sequence
  Description of Artificial Sequence: Synthetic peptide
GGGE

SEQ ID NO: 1318 - protein, 4 aa, Artificial Sequence
  Description of Artificial Sequence: Synthetic peptide
EGGG

SEQ ID NO: 1319 - protein, 4 aa, Artificial Sequence
  Description of Artificial Sequence: Synthetic peptide
GEGG

SEQ ID NO: 1320 - protein, 4 aa, Artificial Sequence
  Description of Artificial Sequence: Synthetic peptide
GGEG

SEQ ID NO: 1321 - protein, 5 aa, Artificial Sequence
  Description of Artificial Sequence: Synthetic peptide
GGGGE

SEQ ID NO: 1322 - protein, 5 aa, Artificial Sequence
  Description of Artificial Sequence: Synthetic peptide
EGGGG

SEQ ID NO: 1323 - protein, 5 aa, Artificial Sequence
  Description of Artificial Sequence: Synthetic peptide
GEGGG

SEQ ID NO: 1324 - protein, 5 aa, Artificial Sequence
  Description of Artificial Sequence: Synthetic peptide
GGEGG

SEQ ID NO: 1325 - protein, 5 aa, Artificial Sequence
  Description of Artificial Sequence: Synthetic peptide
GGGEG

SEQ ID NO: 1326 - protein, 5 aa, Artificial Sequence
  Description of Artificial Sequence: Synthetic peptide
GGGEE

SEQ ID NO: 1327 - protein, 5 aa, Artificial Sequence
  Description of Artificial Sequence: Synthetic peptide
EEGGG

SEQ ID NO: 1328 - protein, 5 aa, Artificial Sequence
  Description of Artificial Sequence: Synthetic peptide
EGEGG

SEQ ID NO: 1329 - protein, 5 aa, Artificial Sequence
  Description of Artificial Sequence: Synthetic peptide
EGGEG

SEQ ID NO: 1330 - protein, 5 aa, Artificial Sequence
  Description of Artificial Sequence: Synthetic peptide
EGGGE

SEQ ID NO: 1331 - protein, 5 aa, Artificial Sequence
  Description of Artificial Sequence: Synthetic peptide
GEEGG

SEQ ID NO: 1332 - protein, 5 aa, Artificial Sequence
  Description of Artificial Sequence: Synthetic peptide
GEGEG

SEQ ID NO: 1333 - protein, 5 aa, Artificial Sequence
  Description of Artificial Sequence: Synthetic peptide
GEGGE

SEQ ID NO: 1334 - protein, 5 aa, Artificial Sequence
  Description of Artificial Sequence: Synthetic peptide
GGEEG

SEQ ID NO: 1335 - protein, 5 aa, Artificial Sequence
  Description of Artificial Sequence: Synthetic peptide
GGEGE

SEQ ID NO: 1336 - protein, 6 aa, Artificial Sequence
  Description of Artificial Sequence: Synthetic peptide
GGGGGE

SEQ ID NO: 1337 - protein, 6 aa, Artificial Sequence
  Description of Artificial Sequence: Synthetic peptide
EGGGGG

SEQ ID NO: 1338 - protein, 6 aa, Artificial Sequence
  Description of Artificial Sequence: Synthetic peptide
GEGGGG

SEQ ID NO: 1339 - protein, 6 aa, Artificial Sequence
  Description of Artificial Sequence: Synthetic peptide
GGEGGG

SEQ ID NO: 1340 - protein, 6 aa, Artificial Sequence
  Description of Artificial Sequence: Synthetic peptide
GGGEGG

SEQ ID NO: 1341 - protein, 6 aa, Artificial Sequence
  Description of Artificial Sequence: Synthetic peptide
GGGGEG

SEQ ID NO: 1342 - protein, 6 aa, Artificial Sequence
  Description of Artificial Sequence: Synthetic peptide
GGGGEE

SEQ ID NO: 1343 - protein, 6 aa, Artificial Sequence
  Description of Artificial Sequence: Synthetic peptide
EEGGGG

SEQ ID NO: 1344 - protein, 6 aa, Artificial Sequence
  Description of Artificial Sequence: Synthetic peptide
EGEGGG

SEQ ID NO: 1345 - protein, 6 aa, Artificial Sequence
  Description of Artificial Sequence: Synthetic peptide
EGGEGG

SEQ ID NO: 1346 - protein, 6 aa, Artificial Sequence
  Description of Artificial Sequence: Synthetic peptide
EGGGEG

SEQ ID NO: 1347 - protein, 6 aa, Artificial Sequence
  Description of Artificial Sequence: Synthetic peptide
EGGGGE

SEQ ID NO: 1348 - protein, 6 aa, Artificial Sequence
  Description of Artificial Sequence: Synthetic peptide
GEEGGG

SEQ ID NO: 1349 - protein, 6 aa, Artificial Sequence
  Description of Artificial Sequence: Synthetic peptide
GEGEGG

SEQ ID NO: 1350 - protein, 6 aa, Artificial Sequence
  Description of Artificial Sequence: Synthetic peptide
GEGGEG

SEQ ID NO: 1351 - protein, 6 aa, Artificial Sequence
  Description of Artificial Sequence: Synthetic peptide
GEGGGE

SEQ ID NO: 1352 - protein, 6 aa, Artificial Sequence
  Description of Artificial Sequence: Synthetic peptide
GGEEGG

SEQ ID NO: 1353 - protein, 6 aa, Artificial Sequence
  Description of Artificial Sequence: Synthetic peptide
GGEGEG

SEQ ID NO: 1354 - protein, 6 aa, Artificial Sequence
  Description of Artificial Sequence: Synthetic peptide
GGEGGE

SEQ ID NO: 1355 - protein, 6 aa, Artificial Sequence
  Description of Artificial Sequence: Synthetic peptide
GGGEEG

SEQ ID NO: 1356 - protein, 6 aa, Artificial Sequence
  Description of Artificial Sequence: Synthetic peptide
GGGEGE

SEQ ID NO: 1357 - protein, 7 aa, Artificial Sequence
  Description of Artificial Sequence: Synthetic peptide
GGGGEEE

SEQ ID NO: 1358 - protein, 7 aa, Artificial Sequence
  Description of Artificial Sequence: Synthetic peptide
EEEGGGG

SEQ ID NO: 1359 - protein, 7 aa, Artificial Sequence
  Description of Artificial Sequence: Synthetic peptide
EGEEGGG

SEQ ID NO: 1360 - protein, 7 aa, Artificial Sequence
  Description of Artificial Sequence: Synthetic peptide
EGEGEGG

SEQ ID NO: 1361 - protein, 7 aa, Artificial Sequence
  Description of Artificial Sequence: Synthetic peptide
EGEGGEG

SEQ ID NO: 1362 - protein, 7 aa, Artificial Sequence
  Description of Artificial Sequence: Synthetic peptide
EGEGGGE

SEQ ID NO: 1363 - protein, 7 aa, Artificial Sequence
  Description of Artificial Sequence: Synthetic peptide
EGGEEGG

SEQ ID NO: 1364 - protein, 7 aa, Artificial Sequence
  Description of Artificial Sequence: Synthetic peptide
EGGEGEG

SEQ ID NO: 1365 - protein, 7 aa, Artificial Sequence
  Description of Artificial Sequence: Synthetic peptide
EGGEGGE

SEQ ID NO: 1366 - protein, 7 aa, Artificial Sequence
  Description of Artificial Sequence: Synthetic peptide
EGGGEGE

SEQ ID NO: 1367 - protein, 7 aa, Artificial Sequence
  Description of Artificial Sequence: Synthetic peptide
EGGGEEG

SEQ ID NO: 1368 - protein, 7 aa, Artificial Sequence
  Description of Artificial Sequence: Synthetic peptide
EGGGGEE

SEQ ID NO: 1369 - protein, 7 aa, Artificial Sequence
  Description of Artificial Sequence: Synthetic peptide
EEGEGGG

SEQ ID NO: 1370 - protein, 7 aa, Artificial Sequence
  Description of Artificial Sequence: Synthetic peptide
EEGGEGG

SEQ ID NO: 1371 - protein, 7 aa, Artificial Sequence
  Description of Artificial Sequence: Synthetic peptide
EEGGGEG

SEQ ID NO: 1372 - protein, 7 aa, Artificial Sequence
  Description of Artificial Sequence: Synthetic peptide
EEGGGGE

SEQ ID NO: 1373 - protein, 7 aa, Artificial Sequence
  Description of Artificial Sequence: Synthetic peptide
GEEEGGG

SEQ ID NO: 1374 - protein, 7 aa, Artificial Sequence
  Description of Artificial Sequence: Synthetic peptide
GEEGEGG

SEQ ID NO: 1375 - protein, 7 aa, Artificial Sequence
  Description of Artificial Sequence: Synthetic peptide
GEEGGEG

SEQ ID NO: 1376 - protein, 7 aa, Artificial Sequence
  Description of Artificial Sequence: Synthetic peptide
GEEGGGE

SEQ ID NO: 1377 - protein, 7 aa, Artificial Sequence
  Description of Artificial Sequence: Synthetic peptide
GEGEEGG

SEQ ID NO: 1378 - protein, 7 aa, Artificial Sequence
  Description of Artificial Sequence: Synthetic peptide
GEGGEEG

SEQ ID NO: 1379 - protein, 7 aa, Artificial Sequence
  Description of Artificial Sequence: Synthetic peptide
GEGGGEE

SEQ ID NO: 1380 - protein, 7 aa, Artificial Sequence
  Description of Artificial Sequence: Synthetic peptide
GEGEGEG

SEQ ID NO: 1381 - protein, 7 aa, Artificial Sequence
  Description of Artificial Sequence: Synthetic peptide
GEGEGGE

SEQ ID NO: 1382 - protein, 7 aa, Artificial Sequence
  Description of Artificial Sequence: Synthetic peptide
GEGGEGE

SEQ ID NO: 1383 - protein, 7 aa, Artificial Sequence
  Description of Artificial Sequence: Synthetic peptide
GGEEEGG

SEQ ID NO: 1384 - protein, 7 aa, Artificial Sequence
  Description of Artificial Sequence: Synthetic peptide
GGEEGEG

SEQ ID NO: 1385 - protein, 7 aa, Artificial Sequence
  Description of Artificial Sequence: Synthetic peptide
GGEEGGE

SEQ ID NO: 1386 - protein, 7 aa, Artificial Sequence
  Description of Artificial Sequence: Synthetic peptide
GGEGEEG

SEQ ID NO: 1387 - protein, 7 aa, Artificial Sequence
  Description of Artificial Sequence: Synthetic peptide
GGEGEGE

SEQ ID NO: 1388 - protein, 7 aa, Artificial Sequence
  Description of Artificial Sequence: Synthetic peptide
GGEGGEE

SEQ ID NO: 1389 - protein, 7 aa, Artificial Sequence
  Description of Artificial Sequence: Synthetic peptide
GGGEEEG

SEQ ID NO: 1390 - protein, 7 aa, Artificial Sequence
  Description of Artificial Sequence: Synthetic peptide
GGGEEGE

SEQ ID NO: 1391 - protein, 7 aa, Artificial Sequence
  Description of Artificial Sequence: Synthetic peptide
GGGEGEE

SEQ ID NO: 1392 - protein, 7 aa, Artificial Sequence
  Description of Artificial Sequence: Synthetic peptide
GGGGGEE

SEQ ID NO: 1393 - protein, 7 aa, Artificial Sequence
  Description of Artificial Sequence: Synthetic peptide
EEGGGGG

SEQ ID NO: 1394 - protein, 7 aa, Artificial Sequence
  Description of Artificial Sequence: Synthetic peptide
EGEGGGG

SEQ ID NO: 1395 - protein, 7 aa, Artificial Sequence
  Description of Artificial Sequence: Synthetic peptide
EGGEGGG

SEQ ID NO: 1396 - protein, 7 aa, Artificial Sequence
  Description of Artificial Sequence: Synthetic peptide
EGGGEGG

SEQ ID NO: 1397 - protein, 7 aa, Artificial Sequence
  Description of Artificial Sequence: Synthetic peptide
EGGGGEG

SEQ ID NO: 1398 - protein, 7 aa, Artificial Sequence
  Description of Artificial Sequence: Synthetic peptide
EGGGGGE

SEQ ID NO: 1399 - protein, 7 aa, Artificial Sequence
  Description of Artificial Sequence: Synthetic peptide
GEEGGGG

SEQ ID NO: 1400 - protein, 7 aa, Artificial Sequence
  Description of Artificial Sequence: Synthetic peptide
GEGEGGG

SEQ ID NO: 1401 - protein, 7 aa, Artificial Sequence
  Description of Artificial Sequence: Synthetic peptide
GEGGEGG

SEQ ID NO: 1402 - protein, 7 aa, Artificial Sequence
  Description of Artificial Sequence: Synthetic peptide
GEGGGEG

SEQ ID NO: 1403 - protein, 7 aa, Artificial Sequence
  Description of Artificial Sequence: Synthetic peptide
GEGGGGE

SEQ ID NO: 1404 - protein, 7 aa, Artificial Sequence
  Description of Artificial Sequence: Synthetic peptide
GGEEGGG

SEQ ID NO: 1405 - protein, 7 aa, Artificial Sequence
  Description of Artificial Sequence: Synthetic peptide
GGEGEGG

SEQ ID NO: 1406 - protein, 7 aa, Artificial Sequence
  Description of Artificial Sequence: Synthetic peptide
GGEGGEG

SEQ ID NO: 1407 - protein, 7 aa, Artificial Sequence
  Description of Artificial Sequence: Synthetic peptide
GGEGGGE

SEQ ID NO: 1408 - protein, 7 aa, Artificial Sequence
  Description of Artificial Sequence: Synthetic peptide
GGGEEGG

SEQ ID NO: 1409 - protein, 7 aa, Artificial Sequence
  Description of Artificial Sequence: Synthetic peptide
GGGEGEG

SEQ ID NO: 1410 - protein, 7 aa, Artificial Sequence
  Description of Artificial Sequence: Synthetic peptide
GGGEGGE

SEQ ID NO: 1411 - protein, 7 aa, Artificial Sequence
  Description of Artificial Sequence: Synthetic peptide
GGGGEEG

SEQ ID NO: 1412 - protein, 7 aa, Artificial Sequence
  Description of Artificial Sequence: Synthetic peptide
GGGGEGE

SEQ ID NO: 1413 - protein, 7 aa, Artificial Sequence
  Description of Artificial Sequence: Synthetic peptide
GGGGGGE

SEQ ID NO: 1414 - protein, 7 aa, Artificial Sequence
  Description of Artificial Sequence: Synthetic peptide
EGGGGGG

SEQ ID NO: 1415 - protein, 7 aa, Artificial Sequence
  Description of Artificial Sequence: Synthetic peptide
GEGGGGG

SEQ ID NO: 1416 - protein, 7 aa, Artificial Sequence
  Description of Artificial Sequence: Synthetic peptide
GGEGGGG

SEQ ID NO: 1417 - protein, 7 aa, Artificial Sequence
  Description of Artificial Sequence: Synthetic peptide
GGGEGGG

SEQ ID NO: 1418 - protein, 7 aa, Artificial Sequence
  Description of Artificial Sequence: Synthetic peptide
GGGGEGG

SEQ ID NO: 1419 - protein, 7 aa, Artificial Sequence
  Description of Artificial Sequence: Synthetic peptide
GGGGGEG

SEQ ID NO: 1420 - protein, 4 aa, Artificial Sequence
  Description of Artificial Sequence: Synthetic peptide
GGGH

SEQ ID NO: 1421 - protein, 4 aa, Artificial Sequence
  Description of Artificial Sequence: Synthetic peptide
HGGG

SEQ ID NO: 1422 - protein, 4 aa, Artificial Sequence
  Description of Artificial Sequence: Synthetic peptide
GHGG

SEQ ID NO: 1423 - protein, 4 aa, Artificial Sequence
  Description of Artificial Sequence: Synthetic peptide
GGHG

SEQ ID NO: 1424 - protein, 5 aa, Artificial Sequence
  Description of Artificial Sequence: Synthetic peptide
GGGGH

SEQ ID NO: 1425 - protein, 5 aa, Artificial Sequence
  Description of Artificial Sequence: Synthetic peptide
HGGGG

SEQ ID NO: 1426 - protein, 5 aa, Artificial Sequence
  Description of Artificial Sequence: Synthetic peptide
GHGGG

SEQ ID NO: 1427 - protein, 5 aa, Artificial Sequence
  Description of Artificial Sequence: Synthetic peptide
GGHGG

SEQ ID NO: 1428 - protein, 5 aa, Artificial Sequence
  Description of Artificial Sequence: Synthetic peptide
GGGHG

SEQ ID NO: 1429 - protein, 5 aa, Artificial Sequence
  Description of Artificial Sequence: Synthetic peptide
GGGHH

SEQ ID NO: 1430 - protein, 5 aa, Artificial Sequence
  Description of Artificial Sequence: Synthetic peptide
HHGGG

SEQ ID NO: 1431 - protein, 5 aa, Artificial Sequence
  Description of Artificial Sequence: Synthetic peptide
HGHGG

SEQ ID NO: 1432 - protein, 5 aa, Artificial Sequence
  Description of Artificial Sequence: Synthetic peptide
HGGHG

SEQ ID NO: 1433 - protein, 5 aa, Artificial Sequence
  Description of Artificial Sequence: Synthetic peptide
HGGGH

SEQ ID NO: 1434 - protein, 5 aa, Artificial Sequence
  Description of Artificial Sequence: Synthetic peptide
GHHGG

SEQ ID NO: 1435 - protein, 5 aa, Artificial Sequence
  Description of Artificial Sequence: Synthetic peptide
GHGHG

SEQ ID NO: 1436 - protein, 5 aa, Artificial Sequence
  Description of Artificial Sequence: Synthetic peptide
GHGGH

SEQ ID NO: 1437 - protein, 5 aa, Artificial Sequence
  Description of Artificial Sequence: Synthetic peptide
GGHHG

SEQ ID NO: 1438 - protein, 5 aa, Artificial Sequence
  Description of Artificial Sequence: Synthetic peptide
GGHGH

SEQ ID NO: 1439 - protein, 6 aa, Artificial Sequence
  Description of Artificial Sequence: Synthetic peptide
GGGGGH

SEQ ID NO: 1440 - protein, 6 aa, Artificial Sequence
  Description of Artificial Sequence: Synthetic peptide
HGGGGG

SEQ ID NO: 1441 - protein, 6 aa, Artificial Sequence
  Description of Artificial Sequence: Synthetic peptide
GHGGGG

SEQ ID NO: 1442 - protein, 6 aa, Artificial Sequence
  Description of Artificial Sequence: Synthetic peptide
GGHGGG

SEQ ID NO: 1443 - protein, 6 aa, Artificial Sequence
  Description of Artificial Sequence: Synthetic peptide
GGGHGG

SEQ ID NO: 1444 - protein, 6 aa, Artificial Sequence
  Description of Artificial Sequence: Synthetic peptide
GGGGHG

SEQ ID NO: 1445 - protein, 6 aa, Artificial Sequence
  Description of Artificial Sequence: Synthetic peptide
GGGGHH

SEQ ID NO: 1446 - protein, 6 aa, Artificial Sequence
  Description of Artificial Sequence: Synthetic peptide
HHGGGG

SEQ ID NO: 1447 - protein, 6 aa, Artificial Sequence
  Description of Artificial Sequence: Synthetic peptide
HGHGGG

SEQ ID NO: 1448 - protein, 6 aa, Artificial Sequence
  Description of Artificial Sequence: Synthetic peptide
HGGHGG

SEQ ID NO: 1449 - protein, 6 aa, Artificial Sequence
  Description of Artificial Sequence: Synthetic peptide
HGGGHG

SEQ ID NO: 1450 - protein, 6 aa, Artificial Sequence
  Description of Artificial Sequence: Synthetic peptide
HGGGGH

SEQ ID NO: 1451 - protein, 6 aa, Artificial Sequence
  Description of Artificial Sequence: Synthetic peptide
GHHGGG

SEQ ID NO: 1452 - protein, 6 aa, Artificial Sequence
  Description of Artificial Sequence: Synthetic peptide
GHGHGG

SEQ ID NO: 1453 - protein, 6 aa, Artificial Sequence
  Description of Artificial Sequence: Synthetic peptide
GHGGHG

SEQ ID NO: 1454 - protein, 6 aa, Artificial Sequence
  Description of Artificial Sequence: Synthetic peptide
GHGGGH

SEQ ID NO: 1455 - protein, 6 aa, Artificial Sequence
  Description of Artificial Sequence: Synthetic peptide
GGHHGG

SEQ ID NO: 1456 - protein, 6 aa, Artificial Sequence
  Description of Artificial Sequence: Synthetic peptide
GGHGHG

SEQ ID NO: 1457 - protein, 6 aa, Artificial Sequence
  Description of Artificial Sequence: Synthetic peptide
GGHGGH

SEQ ID NO: 1458 - protein, 6 aa, Artificial Sequence
  Description of Artificial Sequence: Synthetic peptide
GGGHHG

SEQ ID NO: 1459 - protein, 6 aa, Artificial Sequence
  Description of Artificial Sequence: Synthetic peptide
GGGHGH

SEQ ID NO: 1460 - protein, 7 aa, Artificial Sequence
  Description of Artificial Sequence: Synthetic peptide
GGGGHHH

SEQ ID NO: 1461 - protein, 7 aa, Artificial Sequence
  Description of Artificial Sequence: Synthetic peptide
HHHGGGG

SEQ ID NO: 1462 - protein, 7 aa, Artificial Sequence
  Description of Artificial Sequence: Synthetic peptide
HGHHGGG

SEQ ID NO: 1463 - protein, 7 aa, Artificial Sequence
  Description of Artificial Sequence: Synthetic peptide
HGHGHGG

SEQ ID NO: 1464 - protein, 7 aa, Artificial Sequence
  Description of Artificial Sequence: Synthetic peptide
HGHGGHG

SEQ ID NO: 1465 - protein, 7 aa, Artificial Sequence
  Description of Artificial Sequence: Synthetic peptide
HGHGGGH

SEQ ID NO: 1466 - protein, 7 aa, Artificial Sequence
  Description of Artificial Sequence: Synthetic peptide
HGGHHGG

SEQ ID NO: 1467 - protein, 7 aa, Artificial Sequence
  Description of Artificial Sequence: Synthetic peptide
HGGHGHG

SEQ ID NO: 1468 - protein, 7 aa, Artificial Sequence
  Description of Artificial Sequence: Synthetic peptide
HGGHGGH

SEQ ID NO: 1469 - protein, 7 aa, Artificial Sequence
  Description of Artificial Sequence: Synthetic peptide
HGGGHGH

SEQ ID NO: 1470 - protein, 7 aa, Artificial Sequence
  Description of Artificial Sequence: Synthetic peptide
HGGGHHG

SEQ ID NO: 1471 - protein, 7 aa, Artificial Sequence
  Description of Artificial Sequence: Synthetic peptide
HGGGGHH

SEQ ID NO: 1472 - protein, 7 aa, Artificial Sequence
  Description of Artificial Sequence: Synthetic peptide
HHGHGGG

SEQ ID NO: 1473 - protein, 7 aa, Artificial Sequence
  Description of Artificial Sequence: Synthetic peptide
HHGGHGG

SEQ ID NO: 1474 - protein, 7 aa, Artificial Sequence
  Description of Artificial Sequence: Synthetic peptide
HHGGGHG

SEQ ID NO: 1475 - protein, 7 aa, Artificial Sequence
  Description of Artificial Sequence: Synthetic peptide
HHGGGGH

SEQ ID NO: 1476 - protein, 7 aa, Artificial Sequence
  Description of Artificial Sequence: Synthetic peptide
GHHHGGG

SEQ ID NO: 1477 - protein, 7 aa, Artificial Sequence
  Description of Artificial Sequence: Synthetic peptide
GHHGHGG

SEQ ID NO: 1478 - protein, 7 aa, Artificial Sequence
  Description of Artificial Sequence: Synthetic peptide
GHHGGHG

SEQ ID NO: 1479 - protein, 7 aa, Artificial Sequence
  Description of Artificial Sequence: Synthetic peptide
GHHGGGH

SEQ ID NO: 1480 - protein, 7 aa, Artificial Sequence
  Description of Artificial Sequence: Synthetic peptide
GHGHHGG

SEQ ID NO: 1481 - protein, 7 aa, Artificial Sequence
  Description of Artificial Sequence: Synthetic peptide
GHGGHHG

SEQ ID NO: 1482 - protein, 7 aa, Artificial Sequence
  Description of Artificial Sequence: Synthetic peptide
GHGGGHH

SEQ ID NO: 1483 - protein, 7 aa, Artificial Sequence
  Description of Artificial Sequence: Synthetic peptide
GHGHGHG

SEQ ID NO: 1484 - protein, 7 aa, Artificial Sequence
  Description of Artificial Sequence: Synthetic peptide
GHGHGGH

SEQ ID NO: 1485 - protein, 7 aa, Artificial Sequence
  Description of Artificial Sequence: Synthetic peptide
GHGGHGH

SEQ ID NO: 1486 - protein, 7 aa, Artificial Sequence
  Description of Artificial Sequence: Synthetic peptide
GGHHHGG

SEQ ID NO: 1487 - protein, 7 aa, Artificial Sequence
  Description of Artificial Sequence: Synthetic peptide
GGHHGHG

SEQ ID NO: 1488 - protein, 7 aa, Artificial Sequence
  Description of Artificial Sequence: Synthetic peptide
GGHHGGH

SEQ ID NO: 1489 - protein, 7 aa, Artificial Sequence
  Description of Artificial Sequence: Synthetic peptide
GGHGHHG

SEQ ID NO: 1490 - protein, 7 aa, Artificial Sequence
  Description of Artificial Sequence: Synthetic peptide
GGHGHGH

SEQ ID NO: 1491 - protein, 7 aa, Artificial Sequence
  Description of Artificial Sequence: Synthetic peptide
GGHGGHH

SEQ ID NO: 1492 - protein, 7 aa, Artificial Sequence
  Description of Artificial Sequence: Synthetic peptide
GGGHHHG

SEQ ID NO: 1493 - protein, 7 aa, Artificial Sequence
  Description of Artificial Sequence: Synthetic peptide
GGGHHGH

SEQ ID NO: 1494 - protein, 7 aa, Artificial Sequence
  Description of Artificial Sequence: Synthetic peptide
GGGHGHH

SEQ ID NO: 1495 - protein, 7 aa, Artificial Sequence
  Description of Artificial Sequence: Synthetic peptide
GGGGGHH

SEQ ID NO: 1496 - protein, 7 aa, Artificial Sequence
  Description of Artificial Sequence: Synthetic peptide
HHGGGGG

SEQ ID NO: 1497 - protein, 7 aa, Artificial Sequence
  Description of Artificial Sequence: Synthetic peptide
HGHGGGG

SEQ ID NO: 1498 - protein, 7 aa, Artificial Sequence
  Description of Artificial Sequence: Synthetic peptide
HGGHGGG

SEQ ID NO: 1499 - protein, 7 aa, Artificial Sequence
  Description of Artificial Sequence: Synthetic peptide
HGGGHGG

SEQ ID NO: 1500 - protein, 7 aa, Artificial Sequence
  Description of Artificial Sequence: Synthetic peptide
HGGGGHG

SEQ ID NO: 1501 - protein, 7 aa, Artificial Sequence
  Description of Artificial Sequence: Synthetic peptide
HGGGGGH

SEQ ID NO: 1502 - protein, 7 aa, Artificial Sequence
  Description of Artificial Sequence: Synthetic peptide
GHHGGGG

SEQ ID NO: 1503 - protein, 7 aa, Artificial Sequence
  Description of Artificial Sequence: Synthetic peptide
GHGHGGG

SEQ ID NO: 1504 - protein, 7 aa, Artificial Sequence
  Description of Artificial Sequence: Synthetic peptide
GHGGHGG

SEQ ID NO: 1505 - protein, 7 aa, Artificial Sequence
  Description of Artificial Sequence: Synthetic peptide
GHGGGHG

SEQ ID NO: 1506 - protein, 7 aa, Artificial Sequence
  Description of Artificial Sequence: Synthetic peptide
GHGGGGH

SEQ ID NO: 1507 - protein, 7 aa, Artificial Sequence
  Description of Artificial Sequence: Synthetic peptide
GGHHGGG

SEQ ID NO: 1508 - protein, 7 aa, Artificial Sequence
  Description of Artificial Sequence: Synthetic peptide
GGHGHGG

SEQ ID NO: 1509 - protein, 7 aa, Artificial Sequence
  Description of Artificial Sequence: Synthetic peptide
GGHGGHG

SEQ ID NO: 1510 - protein, 7 aa, Artificial Sequence
  Description of Artificial Sequence: Synthetic peptide
GGHGGGH

SEQ ID NO: 1511 - protein, 7 aa, Artificial Sequence
  Description of Artificial Sequence: Synthetic peptide
GGGHHGG

SEQ ID NO: 1512 - protein, 7 aa, Artificial Sequence
  Description of Artificial Sequence: Synthetic peptide
GGGHGHG

SEQ ID NO: 1513 - protein, 7 aa, Artificial Sequence
  Description of Artificial Sequence: Synthetic peptide
GGGHGGH

SEQ ID NO: 1514 - protein, 7 aa, Artificial Sequence
  Description of Artificial Sequence: Synthetic peptide
GGGGHHG

SEQ ID NO: 1515 - protein, 7 aa, Artificial Sequence
  Description of Artificial Sequence: Synthetic peptide
GGGGHGH

SEQ ID NO: 1516 - protein, 7 aa, Artificial Sequence
  Description of Artificial Sequence: Synthetic peptide
GGGGGGH

SEQ ID NO: 1517 - protein, 7 aa, Artificial Sequence
  Description of Artificial Sequence: Synthetic peptide
HGGGGGG

SEQ ID NO: 1518 - protein, 7 aa, Artificial Sequence
  Description of Artificial Sequence: Synthetic peptide
GHGGGGG

SEQ ID NO: 1519 - protein, 7 aa, Artificial Sequence
  Description of Artificial Sequence: Synthetic peptide
GGHGGGG

SEQ ID NO: 1520 - protein, 7 aa, Artificial Sequence
  Description of Artificial Sequence: Synthetic peptide
GGGHGGG

SEQ ID NO: 1521 - protein, 7 aa, Artificial Sequence
  Description of Artificial Sequence: Synthetic peptide
GGGGHGG

SEQ ID NO: 1522 - protein, 7 aa, Artificial Sequence
  Description of Artificial Sequence: Synthetic peptide
GGGGGHG

SEQ ID NO: 1523 - protein, 4 aa, Artificial Sequence
  Description of Artificial Sequence: Synthetic peptide
GGGN

SEQ ID NO: 1524 - protein, 4 aa, Artificial Sequence
  Description of Artificial Sequence: Synthetic peptide
NGGG

SEQ ID NO: 1525 - protein, 4 aa, Artificial Sequence
  Description of Artificial Sequence: Synthetic peptide
GNGG

SEQ ID NO: 1526 - protein, 4 aa, Artificial Sequence
  Description of Artificial Sequence: Synthetic peptide
GGNG

SEQ ID NO: 1527 - protein, 5 aa, Artificial Sequence
  Description of Artificial Sequence: Synthetic peptide
GGGGN

SEQ ID NO: 1528 - protein, 5 aa, Artificial Sequence
  Description of Artificial Sequence: Synthetic peptide
NGGGG

SEQ ID NO: 1529 - protein, 5 aa, Artificial Sequence
  Description of Artificial Sequence: Synthetic peptide
GNGGG

SEQ ID NO: 1530 - protein, 5 aa, Artificial Sequence
  Description of Artificial Sequence: Synthetic peptide
GGNGG

SEQ ID NO: 1531 - protein, 5 aa, Artificial Sequence
  Description of Artificial Sequence: Synthetic peptide
GGGNG

SEQ ID NO: 1532 - protein, 5 aa, Artificial Sequence
  Description of Artificial Sequence: Synthetic peptide
GGGNN

SEQ ID NO: 1533 - protein, 5 aa, Artificial Sequence
  Description of Artificial Sequence: Synthetic peptide
NNGGG

SEQ ID NO: 1534 - protein, 5 aa, Artificial Sequence
  Description of Artificial Sequence: Synthetic peptide
NGNGG

SEQ ID NO: 1535 - protein, 5 aa, Artificial Sequence
  Description of Artificial Sequence: Synthetic peptide
NGGNG

SEQ ID NO: 1536 - protein, 5 aa, Artificial Sequence
  Description of Artificial Sequence: Synthetic peptide
NGGGN

SEQ ID NO: 1537 - protein, 5 aa, Artificial Sequence
  Description of Artificial Sequence: Synthetic peptide
GNNGG

SEQ ID NO: 1538 - protein, 5 aa, Artificial Sequence
  Description of Artificial Sequence: Synthetic peptide
GNGNG

SEQ ID NO: 1539 - protein, 5 aa, Artificial Sequence
  Description of Artificial Sequence: Synthetic peptide
GNGGN

SEQ ID NO: 1540 - protein, 5 aa, Artificial Sequence
  Description of Artificial Sequence: Synthetic peptide
GGNNG

SEQ ID NO: 1541 - protein, 5 aa, Artificial Sequence
  Description of Artificial Sequence: Synthetic peptide
GGNGN

SEQ ID NO: 1542 - protein, 6 aa, Artificial Sequence
  Description of Artificial Sequence: Synthetic peptide
GGGGGN

SEQ ID NO: 1543 - protein, 6 aa, Artificial Sequence
  Description of Artificial Sequence: Synthetic peptide
NGGGGG

SEQ ID NO: 1544 - protein, 6 aa, Artificial Sequence
  Description of Artificial Sequence: Synthetic peptide
GNGGGG

SEQ ID NO: 1545 - protein, 6 aa, Artificial Sequence
  Description of Artificial Sequence: Synthetic peptide
GGNGGG

SEQ ID NO: 1546 - protein, 6 aa, Artificial Sequence
  Description of Artificial Sequence: Synthetic peptide
GGGNGG

SEQ ID NO: 1547 - protein, 6 aa, Artificial Sequence
  Description of Artificial Sequence: Synthetic peptide
GGGGNG

SEQ ID NO: 1548 - protein, 6 aa, Artificial Sequence
  Description of Artificial Sequence: Synthetic peptide
GGGGNN

SEQ ID NO: 1549 - protein, 6 aa, Artificial Sequence
  Description of Artificial Sequence: Synthetic peptide
NNGGGG

SEQ ID NO: 1550 - protein, 6 aa, Artificial Sequence
  Description of Artificial Sequence: Synthetic peptide
NGNGGG

SEQ ID NO: 1551 - protein, 6 aa, Artificial Sequence
  Description of Artificial Sequence: Synthetic peptide
NGGNGG

SEQ ID NO: 1552 - protein, 6 aa, Artificial Sequence
  Description of Artificial Sequence: Synthetic peptide
NGGGNG

SEQ ID NO: 1553 - protein, 6 aa, Artificial Sequence
  Description of Artificial Sequence: Synthetic peptide
NGGGGN

SEQ ID NO: 1554 - protein, 6 aa, Artificial Sequence
  Description of Artificial Sequence: Synthetic peptide
GNNGGG

SEQ ID NO: 1555 - protein, 6 aa, Artificial Sequence
  Description of Artificial Sequence: Synthetic peptide
GNGNGG

SEQ ID NO: 1556 - protein, 6 aa, Artificial Sequence
  Description of Artificial Sequence: Synthetic peptide
GNGGNG

SEQ ID NO: 1557 - protein, 6 aa, Artificial Sequence
  Description of Artificial Sequence: Synthetic peptide
GNGGGN

SEQ ID NO: 1558 - protein, 6 aa, Artificial Sequence
  Description of Artificial Sequence: Synthetic peptide
GGNNGG

SEQ ID NO: 1559 - protein, 6 aa, Artificial Sequence
  Description of Artificial Sequence: Synthetic peptide
GGNGNG

SEQ ID NO: 1560 - protein, 6 aa, Artificial Sequence
  Description of Artificial Sequence: Synthetic peptide
GGNGGN

SEQ ID NO: 1561 - protein, 6 aa, Artificial Sequence
  Description of Artificial Sequence: Synthetic peptide
GGGNNG

SEQ ID NO: 1562 - protein, 6 aa, Artificial Sequence
  Description of Artificial Sequence: Synthetic peptide
GGGNGN

SEQ ID NO: 1563 - protein, 7 aa, Artificial Sequence
  Description of Artificial Sequence: Synthetic peptide
GGGGNNN

SEQ ID NO: 1564 - protein, 7 aa, Artificial Sequence
  Description of Artificial Sequence: Synthetic peptide
NNNGGGG

SEQ ID NO: 1565 - protein, 7 aa, Artificial Sequence
  Description of Artificial Sequence: Synthetic peptide
NGNNGGG

SEQ ID NO: 1566 - protein, 7 aa, Artificial Sequence
  Description of Artificial Sequence: Synthetic peptide
NGNGNGG

SEQ ID NO: 1567 - protein, 7 aa, Artificial Sequence
  Description of Artificial Sequence: Synthetic peptide
NGNGGNG

SEQ ID NO: 1568 - protein, 7 aa, Artificial Sequence
  Description of Artificial Sequence: Synthetic peptide
NGNGGGN

SEQ ID NO: 1569 - protein, 7 aa, Artificial Sequence
  Description of Artificial Sequence: Synthetic peptide
NGGNNGG

SEQ ID NO: 1570 - protein, 7 aa, Artificial Sequence
  Description of Artificial Sequence: Synthetic peptide
NGGNGNG

SEQ ID NO: 1571 - protein, 7 aa, Artificial Sequence
  Description of Artificial Sequence: Synthetic peptide
NGGNGGN

SEQ ID NO: 1572 - protein, 7 aa, Artificial Sequence
  Description of Artificial Sequence: Synthetic peptide
NGGGNGN

SEQ ID NO: 1573 - protein, 7 aa, Artificial Sequence
  Description of Artificial Sequence: Synthetic peptide
NGGGNNG

SEQ ID NO: 1574 - protein, 7 aa, Artificial Sequence
  Description of Artificial Sequence: Synthetic peptide
NGGGGNN

SEQ ID NO: 1575 - protein, 7 aa, Artificial Sequence
  Description of Artificial Sequence: Synthetic peptide
NNGNGGG

SEQ ID NO: 1576 - protein, 7 aa, Artificial Sequence
  Description of Artificial Sequence: Synthetic peptide
NNGGNGG

SEQ ID NO: 1577 - protein, 7 aa, Artificial Sequence
  Description of Artificial Sequence: Synthetic peptide
NNGGGNG

SEQ ID NO: 1578 - protein, 7 aa, Artificial Sequence
  Description of Artificial Sequence: Synthetic peptide
NNGGGGN

SEQ ID NO: 1579 - protein, 7 aa, Artificial Sequence
  Description of Artificial Sequence: Synthetic peptide
GNNNGGG

SEQ ID NO: 1580 - protein, 7 aa, Artificial Sequence
  Description of Artificial Sequence: Synthetic peptide
GNNGNGG

SEQ ID NO: 1581 - protein, 7 aa, Artificial Sequence
  Description of Artificial Sequence: Synthetic peptide
GNNGGNG

SEQ ID NO: 1582 - protein, 7 aa, Artificial Sequence
  Description of Artificial Sequence: Synthetic peptide
GNNGGGN

SEQ ID NO: 1583 - protein, 7 aa, Artificial Sequence
  Description of Artificial Sequence: Synthetic peptide
GNGNNGG

SEQ ID NO: 1584 - protein, 7 aa, Artificial Sequence
  Description of Artificial Sequence: Synthetic peptide
GNGGNNG

SEQ ID NO: 1585 - protein, 7 aa, Artificial Sequence
  Description of Artificial Sequence: Synthetic peptide
GNGGGNN

SEQ ID NO: 1586 - protein, 7 aa, Artificial Sequence
  Description of Artificial Sequence: Synthetic peptide
GNGNGNG

SEQ ID NO: 1587 - protein, 7 aa, Artificial Sequence
  Description of Artificial Sequence: Synthetic peptide
GNGNGGN

SEQ ID NO: 1588 - protein, 7 aa, Artificial Sequence
  Description of Artificial Sequence: Synthetic peptide
GNGGNGN

SEQ ID NO: 1589 - protein, 7 aa, Artificial Sequence
  Description of Artificial Sequence: Synthetic peptide
GGNNNGG

SEQ ID NO: 1590 - protein, 7 aa, Artificial Sequence
  Description of Artificial Sequence: Synthetic peptide
GGNNGNG

SEQ ID NO: 1591 - protein, 7 aa, Artificial Sequence
  Description of Artificial Sequence: Synthetic peptide
GGNNGGN

SEQ ID NO: 1592 - protein, 7 aa, Artificial Sequence
  Description of Artificial Sequence: Synthetic peptide
GGNGNNG

SEQ ID NO: 1593 - protein, 7 aa, Artificial Sequence
  Description of Artificial Sequence: Synthetic peptide
GGNGNGN

SEQ ID NO: 1594 - protein, 7 aa, Artificial Sequence
  Description of Artificial Sequence: Synthetic peptide
GGNGGNN

SEQ ID NO: 1595 - protein, 7 aa, Artificial Sequence
  Description of Artificial Sequence: Synthetic peptide
GGGNNNG

SEQ ID NO: 1596 - protein, 7 aa, Artificial Sequence
  Description of Artificial Sequence: Synthetic peptide
GGGNNGN

SEQ ID NO: 1597 - protein, 7 aa, Artificial Sequence
  Description of Artificial Sequence: Synthetic peptide
GGGNGNN

SEQ ID NO: 1598 - protein, 7 aa, Artificial Sequence
  Description of Artificial Sequence: Synthetic peptide
GGGGGNN

SEQ ID NO: 1599 - protein, 7 aa, Artificial Sequence
  Description of Artificial Sequence: Synthetic peptide
NNGGGGG

SEQ ID NO: 1600 - protein, 7 aa, Artificial Sequence
  Description of Artificial Sequence: Synthetic peptide
NGNGGGG

SEQ ID NO: 1601 - protein, 7 aa, Artificial Sequence
  Description of Artificial Sequence: Synthetic peptide
NGGNGGG

SEQ ID NO: 1602 - protein, 7 aa, Artificial Sequence
  Description of Artificial Sequence: Synthetic peptide
NGGGNGG

SEQ ID NO: 1603 - protein, 7 aa, Artificial Sequence
  Description of Artificial Sequence: Synthetic peptide
NGGGGNG

SEQ ID NO: 1604 - protein, 7 aa, Artificial Sequence
  Description of Artificial Sequence: Synthetic peptide
NGGGGGN

SEQ ID NO: 1605 - protein, 7 aa, Artificial Sequence
  Description of Artificial Sequence: Synthetic peptide
GNNGGGG

SEQ ID NO: 1606 - protein, 7 aa, Artificial Sequence
  Description of Artificial Sequence: Synthetic peptide
GNGNGGG

SEQ ID NO: 1607 - protein, 7 aa, Artificial Sequence
  Description of Artificial Sequence: Synthetic peptide
GNGGNGG

SEQ ID NO: 1608 - protein, 7 aa, Artificial Sequence
  Description of Artificial Sequence: Synthetic peptide
GNGGGNG

SEQ ID NO: 1609 - protein, 7 aa, Artificial Sequence
  Description of Artificial Sequence: Synthetic peptide
GNGGGGN

SEQ ID NO: 1610 - protein, 7 aa, Artificial Sequence
  Description of Artificial Sequence: Synthetic peptide
GGNNGGG

SEQ ID NO: 1611 - protein, 7 aa, Artificial Sequence
  Description of Artificial Sequence: Synthetic peptide
GGNGNGG

SEQ ID NO: 1612 - protein, 7 aa, Artificial Sequence
  Description of Artificial Sequence: Synthetic peptide
GGNGGNG

SEQ ID NO: 1613 - protein, 7 aa, Artificial Sequence
  Description of Artificial Sequence: Synthetic peptide
GGNGGGN

SEQ ID NO: 1614 - protein, 7 aa, Artificial Sequence
  Description of Artificial Sequence: Synthetic peptide
GGGNNGG

SEQ ID NO: 1615 - protein, 7 aa, Artificial Sequence
  Description of Artificial Sequence: Synthetic peptide
GGGNGNG

SEQ ID NO: 1616 - protein, 7 aa, Artificial Sequence
  Description of Artificial Sequence: Synthetic peptide
GGGNGGN

SEQ ID NO: 1617 - protein, 7 aa, Artificial Sequence
  Description of Artificial Sequence: Synthetic peptide
GGGGNNG

SEQ ID NO: 1618 - protein, 7 aa, Artificial Sequence
  Description of Artificial Sequence: Synthetic peptide
GGGGNGN

SEQ ID NO: 1619 - protein, 7 aa, Artificial Sequence
  Description of Artificial Sequence: Synthetic peptide
GGGGGGN

SEQ ID NO: 1620 - protein, 7 aa, Artificial Sequence
  Description of Artificial Sequence: Synthetic peptide
NGGGGGG

SEQ ID NO: 1621 - protein, 7 aa, Artificial Sequence
  Description of Artificial Sequence: Synthetic peptide
GNGGGGG

SEQ ID NO: 1622 - protein, 7 aa, Artificial Sequence
  Description of Artificial Sequence: Synthetic peptide
GGNGGGG

SEQ ID NO: 1623 - protein, 7 aa, Artificial Sequence
  Description of Artificial Sequence: Synthetic peptide
GGGNGGG

SEQ ID NO: 1624 - protein, 7 aa, Artificial Sequence
  Description of Artificial Sequence: Synthetic peptide
GGGGNGG

SEQ ID NO: 1625 - protein, 7 aa, Artificial Sequence
  Description of Artificial Sequence: Synthetic peptide
GGGGGNG

SEQ ID NO: 1626 - protein, 4 aa, Artificial Sequence
  Description of Artificial Sequence: Synthetic peptide
GGGD

SEQ ID NO: 1627 - protein, 4 aa, Artificial Sequence
  Description of Artificial Sequence: Synthetic peptide
DGGG

SEQ ID NO: 1628 - protein, 4 aa, Artificial Sequence
  Description of Artificial Sequence: Synthetic peptide
GDGG

SEQ ID NO: 1629 - protein, 4 aa, Artificial Sequence
  Description of Artificial Sequence: Synthetic peptide
GGDG

SEQ ID NO: 1630 - protein, 5 aa, Artificial Sequence
  Description of Artificial Sequence: Synthetic peptide
GGGGD

SEQ ID NO: 1631 - protein, 5 aa, Artificial Sequence
  Description of Artificial Sequence: Synthetic peptide
DGGGG

SEQ ID NO: 1632 - protein, 5 aa, Artificial Sequence
  Description of Artificial Sequence: Synthetic peptide
GDGGG

SEQ ID NO: 1633 - protein, 5 aa, Artificial Sequence
  Description of Artificial Sequence: Synthetic peptide
GGDGG

SEQ ID NO: 1634 - protein, 5 aa, Artificial Sequence
  Description of Artificial Sequence: Synthetic peptide
GGGDG

SEQ ID NO: 1635 - protein, 5 aa, Artificial Sequence
  Description of Artificial Sequence: Synthetic peptide
GGGDD

SEQ ID NO: 1636 - protein, 5 aa, Artificial Sequence
  Description of Artificial Sequence: Synthetic peptide
DDGGG

SEQ ID NO: 1637 - protein, 5 aa, Artificial Sequence
  Description of Artificial Sequence: Synthetic peptide
DGDGG

SEQ ID NO: 1638 - protein, 5 aa, Artificial Sequence
  Description of Artificial Sequence: Synthetic peptide
DGGDG

SEQ ID NO: 1639 - protein, 5 aa, Artificial Sequence
  Description of Artificial Sequence: Synthetic peptide
DGGGD

SEQ ID NO: 1640 - protein, 5 aa, Artificial Sequence
  Description of Artificial Sequence: Synthetic peptide
GDDGG

SEQ ID NO: 1641 - protein, 5 aa, Artificial Sequence
  Description of Artificial Sequence: Synthetic peptide
GDGDG

SEQ ID NO: 1642 - protein, 5 aa, Artificial Sequence
  Description of Artificial Sequence: Synthetic peptide
GDGGD

SEQ ID NO: 1643 - protein, 5 aa, Artificial Sequence
  Description of Artificial Sequence: Synthetic peptide
GGDDG

SEQ ID NO: 1644 - protein, 5 aa, Artificial Sequence
  Description of Artificial Sequence: Synthetic peptide
GGDGD

SEQ ID NO: 1645 - protein, 6 aa, Artificial Sequence
  Description of Artificial Sequence: Synthetic peptide
GGGGGD

SEQ ID NO: 1646 - protein, 6 aa, Artificial Sequence
  Description of Artificial Sequence: Synthetic peptide
DGGGGG

SEQ ID NO: 1647 - protein, 6 aa, Artificial Sequence
  Description of Artificial Sequence: Synthetic peptide
GDGGGG

SEQ ID NO: 1648 - protein, 6 aa, Artificial Sequence
  Description of Artificial Sequence: Synthetic peptide
GGDGGG

SEQ ID NO: 1649 - protein, 6 aa, Artificial Sequence
  Description of Artificial Sequence: Synthetic peptide
GGGDGG

SEQ ID NO: 1650 - protein, 6 aa, Artificial Sequence
  Description of Artificial Sequence: Synthetic peptide
GGGGDG

SEQ ID NO: 1651 - protein, 6 aa, Artificial Sequence
  Description of Artificial Sequence: Synthetic peptide
GGGGDD

SEQ ID NO: 1652 - protein, 6 aa, Artificial Sequence
  Description of Artificial Sequence: Synthetic peptide
DDGGGG

SEQ ID NO: 1653 - protein, 6 aa, Artificial Sequence
  Description of Artificial Sequence: Synthetic peptide
DGDGGG

SEQ ID NO: 1654 - protein, 6 aa, Artificial Sequence
  Description of Artificial Sequence: Synthetic peptide
DGGDGG

SEQ ID NO: 1655 - protein, 6 aa, Artificial Sequence
  Description of Artificial Sequence: Synthetic peptide
DGGGDG

SEQ ID NO: 1656 - protein, 6 aa, Artificial Sequence
  Description of Artificial Sequence: Synthetic peptide
DGGGGD

SEQ ID NO: 1657 - protein, 6 aa, Artificial Sequence
  Description of Artificial Sequence: Synthetic peptide
GDDGGG

SEQ ID NO: 1658 - protein, 6 aa, Artificial Sequence
  Description of Artificial Sequence: Synthetic peptide
GDGDGG

SEQ ID NO: 1659 - protein, 6 aa, Artificial Sequence
  Description of Artificial Sequence: Synthetic peptide
GDGGDG

SEQ ID NO: 1660 - protein, 6 aa, Artificial Sequence
  Description of Artificial Sequence: Synthetic peptide
GDGGGD

SEQ ID NO: 1661 - protein, 6 aa, Artificial Sequence
  Description of Artificial Sequence: Synthetic peptide
GGDDGG

SEQ ID NO: 1662 - protein, 6 aa, Artificial Sequence
  Description of Artificial Sequence: Synthetic peptide
GGDGDG

SEQ ID NO: 1663 - protein, 6 aa, Artificial Sequence
  Description of Artificial Sequence: Synthetic peptide
GGDGGD

SEQ ID NO: 1664 - protein, 6 aa, Artificial Sequence
  Description of Artificial Sequence: Synthetic peptide
GGGDDG

SEQ ID NO: 1665 - protein, 6 aa, Artificial Sequence
  Description of Artificial Sequence: Synthetic peptide
GGGDGD

SEQ ID NO: 1666 - protein, 7 aa, Artificial Sequence
  Description of Artificial Sequence: Synthetic peptide
GGGGDDD

SEQ ID NO: 1667 - protein, 7 aa, Artificial Sequence
  Description of Artificial Sequence: Synthetic peptide
DDDGGGG

SEQ ID NO: 1668 - protein, 7 aa, Artificial Sequence
  Description of Artificial Sequence: Synthetic peptide
DGDDGGG

SEQ ID NO: 1669 - protein, 7 aa, Artificial Sequence
  Description of Artificial Sequence: Synthetic peptide
DGDGDGG

SEQ ID NO: 1670 - protein, 7 aa, Artificial Sequence
  Description of Artificial Sequence: Synthetic peptide
DGDGGDG

SEQ ID NO: 1671 - protein, 7 aa, Artificial Sequence
  Description of Artificial Sequence: Synthetic peptide
DGDGGGD

SEQ ID NO: 1672 - protein, 7 aa, Artificial Sequence
  Description of Artificial Sequence: Synthetic peptide
DGGDDGG

SEQ ID NO: 1673 - protein, 7 aa, Artificial Sequence
  Description of Artificial Sequence: Synthetic peptide
DGGDGDG

SEQ ID NO: 1674 - protein, 7 aa, Artificial Sequence
  Description of Artificial Sequence: Synthetic peptide
DGGDGGD

SEQ ID NO: 1675 - protein, 7 aa, Artificial Sequence
  Description of Artificial Sequence: Synthetic peptide
DGGGDGD

SEQ ID NO: 1676 - protein, 7 aa, Artificial Sequence
  Description of Artificial Sequence: Synthetic peptide
DGGGDDG

SEQ ID NO: 1677 - protein, 7 aa, Artificial Sequence
  Description of Artificial Sequence: Synthetic peptide
DGGGGDD

SEQ ID NO: 1678 - protein, 7 aa, Artificial Sequence
  Description of Artificial Sequence: Synthetic peptide
DDGDGGG

SEQ ID NO: 1679 - protein, 7 aa, Artificial Sequence
  Description of Artificial Sequence: Synthetic peptide
DDGGDGG

SEQ ID NO: 1680 - protein, 7 aa, Artificial Sequence
  Description of Artificial Sequence: Synthetic peptide
DDGGGDG

SEQ ID NO: 1681 - protein, 7 aa, Artificial Sequence
  Description of Artificial Sequence: Synthetic peptide
DDGGGGD

SEQ ID NO: 1682 - protein, 7 aa, Artificial Sequence
  Description of Artificial Sequence: Synthetic peptide
GDDDGGG

SEQ ID NO: 1683 - protein, 7 aa, Artificial Sequence
  Description of Artificial Sequence: Synthetic peptide
GDDGDGG

SEQ ID NO: 1684 - protein, 7 aa, Artificial Sequence
  Description of Artificial Sequence: Synthetic peptide
GDDGGDG

SEQ ID NO: 1685 - protein, 7 aa, Artificial Sequence
  Description of Artificial Sequence: Synthetic peptide
GDDGGGD

SEQ ID NO: 1686 - protein, 7 aa, Artificial Sequence
  Description of Artificial Sequence: Synthetic peptide
GDGDDGG

SEQ ID NO: 1687 - protein, 7 aa, Artificial Sequence
  Description of Artificial Sequence: Synthetic peptide
GDGGDDG

SEQ ID NO: 1688 - protein, 7 aa, Artificial Sequence
  Description of Artificial Sequence: Synthetic peptide
GDGGGDD

SEQ ID NO: 1689 - protein, 7 aa, Artificial Sequence
  Description of Artificial Sequence: Synthetic peptide
GDGDGDG

SEQ ID NO: 1690 - protein, 7 aa, Artificial Sequence
  Description of Artificial Sequence: Synthetic peptide
GDGDGGD

SEQ ID NO: 1691 - protein, 7 aa, Artificial Sequence
  Description of Artificial Sequence: Synthetic peptide
GDGGDGD

SEQ ID NO: 1692 - protein, 7 aa, Artificial Sequence
  Description of Artificial Sequence: Synthetic peptide
GGDDDGG

SEQ ID NO: 1693 - protein, 7 aa, Artificial Sequence
  Description of Artificial Sequence: Synthetic peptide
GGDDGDG

SEQ ID NO: 1694 - protein, 7 aa, Artificial Sequence
  Description of Artificial Sequence: Synthetic peptide
GGDDGGD

SEQ ID NO: 1695 - protein, 7 aa, Artificial Sequence
  Description of Artificial Sequence: Synthetic peptide
GGDGDDG

SEQ ID NO: 1696 - protein, 7 aa, Artificial Sequence
  Description of Artificial Sequence: Synthetic peptide
GGDGDGD

SEQ ID NO: 1697 - protein, 7 aa, Artificial Sequence
  Description of Artificial Sequence: Synthetic peptide
GGDGGDD

SEQ ID NO: 1698 - protein, 7 aa, Artificial Sequence
  Description of Artificial Sequence: Synthetic peptide
GGGDDDG

SEQ ID NO: 1699 - protein, 7 aa, Artificial Sequence
  Description of Artificial Sequence: Synthetic peptide
GGGDDGD

SEQ ID NO: 1700 - protein, 7 aa, Artificial Sequence
  Description of Artificial Sequence: Synthetic peptide
GGGDGDD

SEQ ID NO: 1701 - protein, 7 aa, Artificial Sequence
  Description of Artificial Sequence: Synthetic peptide
GGGGGDD

SEQ ID NO: 1702 - protein, 7 aa, Artificial Sequence
  Description of Artificial Sequence: Synthetic peptide
DDGGGGG

SEQ ID NO: 1703 - protein, 7 aa, Artificial Sequence
  Description of Artificial Sequence: Synthetic peptide
DGDGGGG

SEQ ID NO: 1704 - protein, 7 aa, Artificial Sequence
  Description of Artificial Sequence: Synthetic peptide
DGGDGGG

SEQ ID NO: 1705 - protein, 7 aa, Artificial Sequence
  Description of Artificial Sequence: Synthetic peptide
DGGGDGG

SEQ ID NO: 1706 - protein, 7 aa, Artificial Sequence
  Description of Artificial Sequence: Synthetic peptide
DGGGGDG

SEQ ID NO: 1707 - protein, 7 aa, Artificial Sequence
  Description of Artificial Sequence: Synthetic peptide
DGGGGGD

SEQ ID NO: 1708 - protein, 7 aa, Artificial Sequence
  Description of Artificial Sequence: Synthetic peptide
GDDGGGG

SEQ ID NO: 1709 - protein, 7 aa, Artificial Sequence
  Description of Artificial Sequence: Synthetic peptide
GDGDGGG

SEQ ID NO: 1710 - protein, 7 aa, Artificial Sequence
  Description of Artificial Sequence: Synthetic peptide
GDGGDGG

SEQ ID NO: 1711 - protein, 7 aa, Artificial Sequence
  Description of Artificial Sequence: Synthetic peptide
GDGGGDG

SEQ ID NO: 1712 - protein, 7 aa, Artificial Sequence
  Description of Artificial Sequence: Synthetic peptide
GDGGGGD

SEQ ID NO: 1713 - protein, 7 aa, Artificial Sequence
  Description of Artificial Sequence: Synthetic peptide
GGDDGGG

SEQ ID NO: 1714 - protein, 7 aa, Artificial Sequence
  Description of Artificial Sequence: Synthetic peptide
GGDGDGG

SEQ ID NO: 1715 - protein, 7 aa, Artificial Sequence
  Description of Artificial Sequence: Synthetic peptide
GGDGGDG

SEQ ID NO: 1716 - protein, 7 aa, Artificial Sequence
  Description of Artificial Sequence: Synthetic peptide
GGDGGGD

SEQ ID NO: 1717 - protein, 7 aa, Artificial Sequence
  Description of Artificial Sequence: Synthetic peptide
GGGDDGG

SEQ ID NO: 1718 - protein, 7 aa, Artificial Sequence
  Description of Artificial Sequence: Synthetic peptide
GGGDGDG

SEQ ID NO: 1719 - protein, 7 aa, Artificial Sequence
  Description of Artificial Sequence: Synthetic peptide
GGGDGGD

SEQ ID NO: 1720 - protein, 7 aa, Artificial Sequence
  Description of Artificial Sequence: Synthetic peptide
GGGGDDG

SEQ ID NO: 1721 - protein, 7 aa, Artificial Sequence
  Description of Artificial Sequence: Synthetic peptide
GGGGDGD

SEQ ID NO: 1722 - protein, 7 aa, Artificial Sequence
  Description of Artificial Sequence: Synthetic peptide
GGGGGGD

SEQ ID NO: 1723 - protein, 7 aa, Artificial Sequence
  Description of Artificial Sequence: Synthetic peptide
DGGGGGG

SEQ ID NO: 1724 - protein, 7 aa, Artificial Sequence
  Description of Artificial Sequence: Synthetic peptide
GDGGGGG

SEQ ID NO: 1725 - protein, 7 aa, Artificial Sequence
  Description of Artificial Sequence: Synthetic peptide
GGDGGGG

SEQ ID NO: 1726 - protein, 7 aa, Artificial Sequence
  Description of Artificial Sequence: Synthetic peptide
GGGDGGG

SEQ ID NO: 1727 - protein, 7 aa, Artificial Sequence
  Description of Artificial Sequence: Synthetic peptide
GGGGDGG

SEQ ID NO: 1728 - protein, 7 aa, Artificial Sequence
  Description of Artificial Sequence: Synthetic peptide
GGGGGDG

SEQ ID NO: 1729 - protein, 4 aa, Artificial Sequence
  Description of Artificial Sequence: Synthetic peptide
QQQT

SEQ ID NO: 1730 - protein, 4 aa, Artificial Sequence
  Description of Artificial Sequence: Synthetic peptide
TQQQ

SEQ ID NO: 1731 - protein, 4 aa, Artificial Sequence
  Description of Artificial Sequence: Synthetic peptide
QTQQ

SEQ ID NO: 1732 - protein, 4 aa, Artificial Sequence
  Description of Artificial Sequence: Synthetic peptide
QQTQ

SEQ ID NO: 1733 - protein, 5 aa, Artificial Sequence
  Description of Artificial Sequence: Synthetic peptide
QQQQT

SEQ ID NO: 1734 - protein, 5 aa, Artificial Sequence
  Description of Artificial Sequence: Synthetic peptide
TQQQQ

SEQ ID NO: 1735 - protein, 5 aa, Artificial Sequence
  Description of Artificial Sequence: Synthetic peptide
QTQQQ

SEQ ID NO: 1736 - protein, 5 aa, Artificial Sequence
  Description of Artificial Sequence: Synthetic peptide
QQTQQ

SEQ ID NO: 1737 - protein, 5 aa, Artificial Sequence
  Description of Artificial Sequence: Synthetic peptide
QQQTQ

SEQ ID NO: 1738 - protein, 5 aa, Artificial Sequence
  Description of Artificial Sequence: Synthetic peptide
QQQTT

SEQ ID NO: 1739 - protein, 5 aa, Artificial Sequence
  Description of Artificial Sequence: Synthetic peptide
TTQQQ

SEQ ID NO: 1740 - protein, 5 aa, Artificial Sequence
  Description of Artificial Sequence: Synthetic peptide
TQTQQ

SEQ ID NO: 1741 - protein, 5 aa, Artificial Sequence
  Description of Artificial Sequence: Synthetic peptide
TQQTQ

SEQ ID NO: 1742 - protein, 5 aa, Artificial Sequence
  Description of Artificial Sequence: Synthetic peptide
TQQQT

SEQ ID NO: 1743 - protein, 5 aa, Artificial Sequence
  Description of Artificial Sequence: Synthetic peptide
QTTQQ

SEQ ID NO: 1744 - protein, 5 aa, Artificial Sequence
  Description of Artificial Sequence: Synthetic peptide
QTQTQ

SEQ ID NO: 1745 - protein, 5 aa, Artificial Sequence
  Description of Artificial Sequence: Synthetic peptide
QTQQT

SEQ ID NO: 1746 - protein, 5 aa, Artificial Sequence
  Description of Artificial Sequence: Synthetic peptide
QQTTQ

SEQ ID NO: 1747 - protein, 5 aa, Artificial Sequence
  Description of Artificial Sequence: Synthetic peptide
QQTQT

SEQ ID NO: 1748 - protein, 6 aa, Artificial Sequence
  Description of Artificial Sequence: Synthetic peptide
QQQQQT

SEQ ID NO: 1749 - protein, 6 aa, Artificial Sequence
  Description of Artificial Sequence: Synthetic peptide
TQQQQQ

SEQ ID NO: 1750 - protein, 6 aa, Artificial Sequence
  Description of Artificial Sequence: Synthetic peptide
QTQQQQ

SEQ ID NO: 1751 - protein, 6 aa, Artificial Sequence
  Description of Artificial Sequence: Synthetic peptide
QQTQQQ

SEQ ID NO: 1752 - protein, 6 aa, Artificial Sequence
  Description of Artificial Sequence: Synthetic peptide
QQQTQQ

SEQ ID NO: 1753 - protein, 6 aa, Artificial Sequence
  Description of Artificial Sequence: Synthetic peptide
QQQQTQ

SEQ ID NO: 1754 - protein, 6 aa, Artificial Sequence
  Description of Artificial Sequence: Synthetic peptide
QQQQTT

SEQ ID NO: 1755 - protein, 6 aa, Artificial Sequence
  Description of Artificial Sequence: Synthetic peptide
TTQQQQ

SEQ ID NO: 1756 - protein, 6 aa, Artificial Sequence
  Description of Artificial Sequence: Synthetic peptide
TQTQQQ

SEQ ID NO: 1757 - protein, 6 aa, Artificial Sequence
  Description of Artificial Sequence: Synthetic peptide
TQQTQQ

SEQ ID NO: 1758 - protein, 6 aa, Artificial Sequence
  Description of Artificial Sequence: Synthetic peptide
TQQQTQ

SEQ ID NO: 1759 - protein, 6 aa, Artificial Sequence
  Description of Artificial Sequence: Synthetic peptide
TQQQQT

SEQ ID NO: 1760 - protein, 6 aa, Artificial Sequence
  Description of Artificial Sequence: Synthetic peptide
QTTQQQ

SEQ ID NO: 1761 - protein, 6 aa, Artificial Sequence
  Description of Artificial Sequence: Synthetic peptide
QTQTQQ

SEQ ID NO: 1762 - protein, 6 aa, Artificial Sequence
  Description of Artificial Sequence: Synthetic peptide
QTQQTQ

SEQ ID NO: 1763 - protein, 6 aa, Artificial Sequence
  Description of Artificial Sequence: Synthetic peptide
QTQQQT

SEQ ID NO: 1764 - protein, 6 aa, Artificial Sequence
  Description of Artificial Sequence: Synthetic peptide
QQTTQQ

SEQ ID NO: 1765 - protein, 6 aa, Artificial Sequence
  Description of Artificial Sequence: Synthetic peptide
QQTQTQ

SEQ ID NO: 1766 - protein, 6 aa, Artificial Sequence
  Description of Artificial Sequence: Synthetic peptide
QQTQQT

SEQ ID NO: 1767 - protein, 6 aa, Artificial Sequence
  Description of Artificial Sequence: Synthetic peptide
QQQTTQ

SEQ ID NO: 1768 - protein, 6 aa, Artificial Sequence
  Description of Artificial Sequence: Synthetic peptide
QQQTQT

SEQ ID NO: 1769 - protein, 7 aa, Artificial Sequence
  Description of Artificial Sequence: Synthetic peptide
QQQQTTT

SEQ ID NO: 1770 - protein, 7 aa, Artificial Sequence
  Description of Artificial Sequence: Synthetic peptide
TTTQQQQ

SEQ ID NO: 1771 - protein, 7 aa, Artificial Sequence
  Description of Artificial Sequence: Synthetic peptide
TQTTQQQ

SEQ ID NO: 1772 - protein, 7 aa, Artificial Sequence
  Description of Artificial Sequence: Synthetic peptide
TQTQTQQ

SEQ ID NO: 1773 - protein, 7 aa, Artificial Sequence
  Description of Artificial Sequence: Synthetic peptide
TQTQQTQ

SEQ ID NO: 1774 - protein, 7 aa, Artificial Sequence
  Description of Artificial Sequence: Synthetic peptide
TQTQQQT

SEQ ID NO: 1775 - protein, 7 aa, Artificial Sequence
  Description of Artificial Sequence: Synthetic peptide
TQQTTQQ

SEQ ID NO: 1776 - protein, 7 aa, Artificial Sequence
  Description of Artificial Sequence: Synthetic peptide
TQQTQTQ

SEQ ID NO: 1777 - protein, 7 aa, Artificial Sequence
  Description of Artificial Sequence: Synthetic peptide
TQQTQQT

SEQ ID NO: 1778 - protein, 7 aa, Artificial Sequence
  Description of Artificial Sequence: Synthetic peptide
TQQQTQT

SEQ ID NO: 1779 - protein, 7 aa, Artificial Sequence
  Description of Artificial Sequence: Synthetic peptide
TQQQTTQ

SEQ ID NO: 1780 - protein, 7 aa, Artificial Sequence
  Description of Artificial Sequence: Synthetic peptide
TQQQQTT

SEQ ID NO: 1781 - protein, 7 aa, Artificial Sequence
  Description of Artificial Sequence: Synthetic peptide
TTQTQQQ

SEQ ID NO: 1782 - protein, 7 aa, Artificial Sequence
  Description of Artificial Sequence: Synthetic peptide
TTQQTQQ

SEQ ID NO: 1783 - protein, 7 aa, Artificial Sequence
  Description of Artificial Sequence: Synthetic peptide
TTQQQTQ

SEQ ID NO: 1784 - protein, 7 aa, Artificial Sequence
  Description of Artificial Sequence: Synthetic peptide
TTQQQQT

SEQ ID NO: 1785 - protein, 7 aa, Artificial Sequence
  Description of Artificial Sequence: Synthetic peptide
QTTTQQQ

SEQ ID NO: 1786 - protein, 7 aa, Artificial Sequence
  Description of Artificial Sequence: Synthetic peptide
QTTQTQQ

SEQ ID NO: 1787 - protein, 7 aa, Artificial Sequence
  Description of Artificial Sequence: Synthetic peptide
QTTQQTQ

SEQ ID NO: 1788 - protein, 7 aa, Artificial Sequence
  Description of Artificial Sequence: Synthetic peptide
QTTQQQT

SEQ ID NO: 1789 - protein, 7 aa, Artificial Sequence
  Description of Artificial Sequence: Synthetic peptide
QTQTTQQ

SEQ ID NO: 1790 - protein, 7 aa, Artificial Sequence
  Description of Artificial Sequence: Synthetic peptide
QTQQTTQ

SEQ ID NO: 1791 - protein, 7 aa, Artificial Sequence
  Description of Artificial Sequence: Synthetic peptide
QTQQQTT

SEQ ID NO: 1792 - protein, 7 aa, Artificial Sequence
  Description of Artificial Sequence: Synthetic peptide
QTQTQTQ

SEQ ID NO: 1793 - protein, 7 aa, Artificial Sequence
  Description of Artificial Sequence: Synthetic peptide
QTQTQQT

SEQ ID NO: 1794 - protein, 7 aa, Artificial Sequence
  Description of Artificial Sequence: Synthetic peptide
QTQQTQT

SEQ ID NO: 1795 - protein, 7 aa, Artificial Sequence
  Description of Artificial Sequence: Synthetic peptide
QQTTTQQ

SEQ ID NO: 1796 - protein, 7 aa, Artificial Sequence
  Description of Artificial Sequence: Synthetic peptide
QQTTQTQ

SEQ ID NO: 1797 - protein, 7 aa, Artificial Sequence
  Description of Artificial Sequence: Synthetic peptide
QQTTQQT

SEQ ID NO: 1798 - protein, 7 aa, Artificial Sequence
  Description of Artificial Sequence: Synthetic peptide
QQTQTTQ

SEQ ID NO: 1799 - protein, 7 aa, Artificial Sequence
  Description of Artificial Sequence: Synthetic peptide
QQTQTQT

SEQ ID NO: 1800 - protein, 7 aa, Artificial Sequence
  Description of Artificial Sequence: Synthetic peptide
QQTQQTT

SEQ ID NO: 1801 - protein, 7 aa, Artificial Sequence
  Description of Artificial Sequence: Synthetic peptide
QQQTTTQ

SEQ ID NO: 1802 - protein, 7 aa, Artificial Sequence
  Description of Artificial Sequence: Synthetic peptide
QQQTTQT

SEQ ID NO: 1803 - protein, 7 aa, Artificial Sequence
  Description of Artificial Sequence: Synthetic peptide
QQQTQTT

SEQ ID NO: 1804 - protein, 7 aa, Artificial Sequence
  Description of Artificial Sequence: Synthetic peptide
QQQQQTT

SEQ ID NO: 1805 - protein, 7 aa, Artificial Sequence
  Description of Artificial Sequence: Synthetic peptide
TTQQQQQ

SEQ ID NO: 1806 - protein, 7 aa, Artificial Sequence
  Description of Artificial Sequence: Synthetic peptide
TQTQQQQ

SEQ ID NO: 1807 - protein, 7 aa, Artificial Sequence
  Description of Artificial Sequence: Synthetic peptide
TQQTQQQ

SEQ ID NO: 1808 - protein, 7 aa, Artificial Sequence
  Description of Artificial Sequence: Synthetic peptide
TQQQTQQ

SEQ ID NO: 1809 - protein, 7 aa, Artificial Sequence
  Description of Artificial Sequence: Synthetic peptide
TQQQQTQ

SEQ ID NO: 1810 - protein, 7 aa, Artificial Sequence
  Description of Artificial Sequence: Synthetic peptide
TQQQQQT

SEQ ID NO: 1811 - protein, 7 aa, Artificial Sequence
  Description of Artificial Sequence: Synthetic peptide
QTTQQQQ

SEQ ID NO: 1812 - protein, 7 aa, Artificial Sequence
  Description of Artificial Sequence: Synthetic peptide
QTQTQQQ

SEQ ID NO: 1813 - protein, 7 aa, Artificial Sequence
  Description of Artificial Sequence: Synthetic peptide
QTQQTQQ

SEQ ID NO: 1814 - protein, 7 aa, Artificial Sequence
  Description of Artificial Sequence: Synthetic peptide
QTQQQTQ

SEQ ID NO: 1815 - protein, 7 aa, Artificial Sequence
  Description of Artificial Sequence: Synthetic peptide
QTQQQQT

SEQ ID NO: 1816 - protein, 7 aa, Artificial Sequence
  Description of Artificial Sequence: Synthetic peptide
QQTTQQQ

SEQ ID NO: 1817 - protein, 7 aa, Artificial Sequence
  Description of Artificial Sequence: Synthetic peptide
QQTQTQQ

SEQ ID NO: 1818 - protein, 7 aa, Artificial Sequence
  Description of Artificial Sequence: Synthetic peptide
QQTQQTQ

SEQ ID NO: 1819 - protein, 7 aa, Artificial Sequence
  Description of Artificial Sequence: Synthetic peptide
QQTQQQT

SEQ ID NO: 1820 - protein, 7 aa, Artificial Sequence
  Description of Artificial Sequence: Synthetic peptide
QQQTTQQ

SEQ ID NO: 1821 - protein, 7 aa, Artificial Sequence
  Description of Artificial Sequence: Synthetic peptide
QQQTQTQ

SEQ ID NO: 1822 - protein, 7 aa, Artificial Sequence
  Description of Artificial Sequence: Synthetic peptide
QQQTQQT

SEQ ID NO: 1823 - protein, 7 aa, Artificial Sequence
  Description of Artificial Sequence: Synthetic peptide
QQQQTTQ

SEQ ID NO: 1824 - protein, 7 aa, Artificial Sequence
  Description of Artificial Sequence: Synthetic peptide
QQQQTQT

SEQ ID NO: 1825 - protein, 7 aa, Artificial Sequence
  Description of Artificial Sequence: Synthetic peptide
QQQQQQT

SEQ ID NO: 1826 - protein, 7 aa, Artificial Sequence
  Description of Artificial Sequence: Synthetic peptide
TQQQQQQ

SEQ ID NO: 1827 - protein, 7 aa, Artificial Sequence
  Description of Artificial Sequence: Synthetic peptide
QTQQQQQ

SEQ ID NO: 1828 - protein, 7 aa, Artificial Sequence
  Description of Artificial Sequence: Synthetic peptide
QQTQQQQ

SEQ ID NO: 1829 - protein, 7 aa, Artificial Sequence
  Description of Artificial Sequence: Synthetic peptide
QQQTQQQ

SEQ ID NO: 1830 - protein, 7 aa, Artificial Sequence
  Description of Artificial Sequence: Synthetic peptide
QQQQTQQ

SEQ ID NO: 1831 - protein, 7 aa, Artificial Sequence
  Description of Artificial Sequence: Synthetic peptide
QQQQQTQ

SEQ ID NO: 1832 - protein, 4 aa, Artificial Sequence
  Description of Artificial Sequence: Synthetic peptide
QQQA

SEQ ID NO: 1833 - protein, 4 aa, Artificial Sequence
  Description of Artificial Sequence: Synthetic peptide
AQQQ

SEQ ID NO: 1834 - protein, 4 aa, Artificial Sequence
  Description of Artificial Sequence: Synthetic peptide
QAQQ

SEQ ID NO: 1835 - protein, 4 aa, Artificial Sequence
  Description of Artificial Sequence: Synthetic peptide
QQAQ

SEQ ID NO: 1836 - protein, 5 aa, Artificial Sequence
  Description of Artificial Sequence: Synthetic peptide
QQQQA

SEQ ID NO: 1837 - protein, 5 aa, Artificial Sequence
  Description of Artificial Sequence: Synthetic peptide
AQQQQ

SEQ ID NO: 1838 - protein, 5 aa, Artificial Sequence
  Description of Artificial Sequence: Synthetic peptide
QAQQQ

SEQ ID NO: 1839 - protein, 5 aa, Artificial Sequence
  Description of Artificial Sequence: Synthetic peptide
QQAQQ

SEQ ID NO: 1840 - protein, 5 aa, Artificial Sequence
  Description of Artificial Sequence: Synthetic peptide
QQQAQ

SEQ ID NO: 1841 - protein, 5 aa, Artificial Sequence
  Description of Artificial Sequence: Synthetic peptide
QQQAA

SEQ ID NO: 1842 - protein, 5 aa, Artificial Sequence
  Description of Artificial Sequence: Synthetic peptide
AAQQQ

SEQ ID NO: 1843 - protein, 5 aa, Artificial Sequence
  Description of Artificial Sequence: Synthetic peptide
AQAQQ

SEQ ID NO: 1844 - protein, 5 aa, Artificial Sequence
  Description of Artificial Sequence: Synthetic peptide
AQQAQ

SEQ ID NO: 1845 - protein, 5 aa, Artificial Sequence
  Description of Artificial Sequence: Synthetic peptide
AQQQA

SEQ ID NO: 1846 - protein, 5 aa, Artificial Sequence
  Description of Artificial Sequence: Synthetic peptide
QAAQQ

SEQ ID NO: 1847 - protein, 5 aa, Artificial Sequence
  Description of Artificial Sequence: Synthetic peptide
QAQAQ

SEQ ID NO: 1848 - protein, 5 aa, Artificial Sequence
  Description of Artificial Sequence: Synthetic peptide
QAQQA

SEQ ID NO: 1849 - protein, 5 aa, Artificial Sequence
  Description of Artificial Sequence: Synthetic peptide
QQAAQ

SEQ ID NO: 1850 - protein, 5 aa, Artificial Sequence
  Description of Artificial Sequence: Synthetic peptide
QQAQA

SEQ ID NO: 1851 - protein, 6 aa, Artificial Sequence
  Description of Artificial Sequence: Synthetic peptide
QQQQQA

SEQ ID NO: 1852 - protein, 6 aa, Artificial Sequence
  Description of Artificial Sequence: Synthetic peptide
AQQQQQ

SEQ ID NO: 1853 - protein, 6 aa, Artificial Sequence
  Description of Artificial Sequence: Synthetic peptide
QAQQQQ

SEQ ID NO: 1854 - protein, 6 aa, Artificial Sequence
  Description of Artificial Sequence: Synthetic peptide
QQAQQQ

SEQ ID NO: 1855 - protein, 6 aa, Artificial Sequence
  Description of Artificial Sequence: Synthetic peptide
QQQAQQ

SEQ ID NO: 1856 - protein, 6 aa, Artificial Sequence
  Description of Artificial Sequence: Synthetic peptide
QQQQAQ

SEQ ID NO: 1857 - protein, 6 aa, Artificial Sequence
  Description of Artificial Sequence: Synthetic peptide
QQQQAA

SEQ ID NO: 1858 - protein, 6 aa, Artificial Sequence
  Description of Artificial Sequence: Synthetic peptide
AAQQQQ

SEQ ID NO: 1859 - protein, 6 aa, Artificial Sequence
  Description of Artificial Sequence: Synthetic peptide
AQAQQQ

SEQ ID NO: 1860 - protein, 6 aa, Artificial Sequence
  Description of Artificial Sequence: Synthetic peptide
AQQAQQ

SEQ ID NO: 1861 - protein, 6 aa, Artificial Sequence
  Description of Artificial Sequence: Synthetic peptide
AQQQAQ

SEQ ID NO: 1862 - protein, 6 aa, Artificial Sequence
  Description of Artificial Sequence: Synthetic peptide
AQQQQA

SEQ ID NO: 1863 - protein, 6 aa, Artificial Sequence
  Description of Artificial Sequence: Synthetic peptide
QAAQQQ

SEQ ID NO: 1864 - protein, 6 aa, Artificial Sequence
  Description of Artificial Sequence: Synthetic peptide
QAQAQQ

SEQ ID NO: 1865 - protein, 6 aa, Artificial Sequence
  Description of Artificial Sequence: Synthetic peptide
QAQQAQ

SEQ ID NO: 1866 - protein, 6 aa, Artificial Sequence
  Description of Artificial Sequence: Synthetic peptide
QAQQQA

SEQ ID NO: 1867 - protein, 6 aa, Artificial Sequence
  Description of Artificial Sequence: Synthetic peptide
QQAAQQ

SEQ ID NO: 1868 - protein, 6 aa, Artificial Sequence
  Description of Artificial Sequence: Synthetic peptide
QQAQAQ

SEQ ID NO: 1869 - protein, 6 aa, Artificial Sequence
  Description of Artificial Sequence: Synthetic peptide
QQAQQA

SEQ ID NO: 1870 - protein, 6 aa, Artificial Sequence
  Description of Artificial Sequence: Synthetic peptide
QQQAAQ

SEQ ID NO: 1871 - protein, 6 aa, Artificial Sequence
  Description of Artificial Sequence: Synthetic peptide
QQQAQA

SEQ ID NO: 1872 - protein, 7 aa, Artificial Sequence
  Description of Artificial Sequence: Synthetic peptide
QQQQAAA

SEQ ID NO: 1873 - protein, 7 aa, Artificial Sequence
  Description of Artificial Sequence: Synthetic peptide
AAAQQQQ

SEQ ID NO: 1874 - protein, 7 aa, Artificial Sequence
  Description of Artificial Sequence: Synthetic peptide
AQAAQQQ

SEQ ID NO: 1875 - protein, 7 aa, Artificial Sequence
  Description of Artificial Sequence: Synthetic peptide
AQAQAQQ

SEQ ID NO: 1876 - protein, 7 aa, Artificial Sequence
  Description of Artificial Sequence: Synthetic peptide
AQAQQAQ

SEQ ID NO: 1877 - protein, 7 aa, Artificial Sequence
  Description of Artificial Sequence: Synthetic peptide
AQAQQQA

SEQ ID NO: 1878 - protein, 7 aa, Artificial Sequence
  Description of Artificial Sequence: Synthetic peptide
AQQAAQQ

SEQ ID NO: 1879 - protein, 7 aa, Artificial Sequence
  Description of Artificial Sequence: Synthetic peptide
AQQAQAQ

SEQ ID NO: 1880 - protein, 7 aa, Artificial Sequence
  Description of Artificial Sequence: Synthetic peptide
AQQAQQA

SEQ ID NO: 1881 - protein, 7 aa, Artificial Sequence
  Description of Artificial Sequence: Synthetic peptide
AQQQAQA

SEQ ID NO: 1882 - protein, 7 aa, Artificial Sequence
  Description of Artificial Sequence: Synthetic peptide
AQQQAAQ

SEQ ID NO: 1883 - protein, 7 aa, Artificial Sequence
  Description of Artificial Sequence: Synthetic peptide
AQQQQAA

SEQ ID NO: 1884 - protein, 7 aa, Artificial Sequence
  Description of Artificial Sequence: Synthetic peptide
AAQAQQQ

SEQ ID NO: 1885 - protein, 7 aa, Artificial Sequence
  Description of Artificial Sequence: Synthetic peptide
AAQQAQQ

SEQ ID NO: 1886 - protein, 7 aa, Artificial Sequence
  Description of Artificial Sequence: Synthetic peptide
AAQQQAQ

SEQ ID NO: 1887 - protein, 7 aa, Artificial Sequence
  Description of Artificial Sequence: Synthetic peptide
AAQQQQA

SEQ ID NO: 1888 - protein, 7 aa, Artificial Sequence
  Description of Artificial Sequence: Synthetic peptide
QAAAQQQ

SEQ ID NO: 1889 - protein, 7 aa, Artificial Sequence
  Description of Artificial Sequence: Synthetic peptide
QAAQAQQ

SEQ ID NO: 1890 - protein, 7 aa, Artificial Sequence
  Description of Artificial Sequence: Synthetic peptide
QAAQQAQ

SEQ ID NO: 1891 - protein, 7 aa, Artificial Sequence
  Description of Artificial Sequence: Synthetic peptide
QAAQQQA

SEQ ID NO: 1892 - protein, 7 aa, Artificial Sequence
  Description of Artificial Sequence: Synthetic peptide
QAQAAQQ

SEQ ID NO: 1893 - protein, 7 aa, Artificial Sequence
  Description of Artificial Sequence: Synthetic peptide
QAQQAAQ

SEQ ID NO: 1894 - protein, 7 aa, Artificial Sequence
  Description of Artificial Sequence: Synthetic peptide
QAQQQAA

SEQ ID NO: 1895 - protein, 7 aa, Artificial Sequence
  Description of Artificial Sequence: Synthetic peptide
QAQAQAQ

SEQ ID NO: 1896 - protein, 7 aa, Artificial Sequence
  Description of Artificial Sequence: Synthetic peptide
QAQAQQA

SEQ ID NO: 1897 - protein, 7 aa, Artificial Sequence
  Description of Artificial Sequence: Synthetic peptide
QAQQAQA

SEQ ID NO: 1898 - protein, 7 aa, Artificial Sequence
  Description of Artificial Sequence: Synthetic peptide
QQAAAQQ

SEQ ID NO: 1899 - protein, 7 aa, Artificial Sequence
  Description of Artificial Sequence: Synthetic peptide
QQAAQAQ

SEQ ID NO: 1900 - protein, 7 aa, Artificial Sequence
  Description of Artificial Sequence: Synthetic peptide
QQAAQQA

SEQ ID NO: 1901 - protein, 7 aa, Artificial Sequence
  Description of Artificial Sequence: Synthetic peptide
QQAQAAQ

SEQ ID NO: 1902 - protein, 7 aa, Artificial Sequence
  Description of Artificial Sequence: Synthetic peptide
QQAQAQA

SEQ ID NO: 1903 - protein, 7 aa, Artificial Sequence
  Description of Artificial Sequence: Synthetic peptide
QQAQQAA

SEQ ID NO: 1904 - protein, 7 aa, Artificial Sequence
  Description of Artificial Sequence: Synthetic peptide
QQQAAAQ

SEQ ID NO: 1905 - protein, 7 aa, Artificial Sequence
  Description of Artificial Sequence: Synthetic peptide
QQQAAQA

SEQ ID NO: 1906 - protein, 7 aa, Artificial Sequence
  Description of Artificial Sequence: Synthetic peptide
QQQAQAA

SEQ ID NO: 1907 - protein, 7 aa, Artificial Sequence
  Description of Artificial Sequence: Synthetic peptide
QQQQQAA

SEQ ID NO: 1908 - protein, 7 aa, Artificial Sequence
  Description of Artificial Sequence: Synthetic peptide
AAQQQQQ

SEQ ID NO: 1909 - protein, 7 aa, Artificial Sequence
  Description of Artificial Sequence: Synthetic peptide
AQAQQQQ

SEQ ID NO: 1910 - protein, 7 aa, Artificial Sequence
  Description of Artificial Sequence: Synthetic peptide
AQQAQQQ

SEQ ID NO: 1911 - protein, 7 aa, Artificial Sequence
  Description of Artificial Sequence: Synthetic peptide
AQQQAQQ

SEQ ID NO: 1912 - protein, 7 aa, Artificial Sequence
  Description of Artificial Sequence: Synthetic peptide
AQQQQAQ

SEQ ID NO: 1913 - protein, 7 aa, Artificial Sequence
  Description of Artificial Sequence: Synthetic peptide
AQQQQQA

SEQ ID NO: 1914 - protein, 7 aa, Artificial Sequence
  Description of Artificial Sequence: Synthetic peptide
QAAQQQQ

SEQ ID NO: 1915 - protein, 7 aa, Artificial Sequence
  Description of Artificial Sequence: Synthetic peptide
QAQAQQQ

SEQ ID NO: 1916 - protein, 7 aa, Artificial Sequence
  Description of Artificial Sequence: Synthetic peptide
QAQQAQQ

SEQ ID NO: 1917 - protein, 7 aa, Artificial Sequence
  Description of Artificial Sequence: Synthetic peptide
QAQQQAQ

SEQ ID NO: 1918 - protein, 7 aa, Artificial Sequence
  Description of Artificial Sequence: Synthetic peptide
QAQQQQA

SEQ ID NO: 1919 - protein, 7 aa, Artificial Sequence
  Description of Artificial Sequence: Synthetic peptide
QQAAQQQ

SEQ ID NO: 1920 - protein, 7 aa, Artificial Sequence
  Description of Artificial Sequence: Synthetic peptide
QQAQAQQ

SEQ ID NO: 1921 - protein, 7 aa, Artificial Sequence
  Description of Artificial Sequence: Synthetic peptide
QQAQQAQ

SEQ ID NO: 1922 - protein, 7 aa, Artificial Sequence
  Description of Artificial Sequence: Synthetic peptide
QQAQQQA

SEQ ID NO: 1923 - protein, 7 aa, Artificial Sequence
  Description of Artificial Sequence: Synthetic peptide
QQQAAQQ

SEQ ID NO: 1924 - protein, 7 aa, Artificial Sequence
  Description of Artificial Sequence: Synthetic peptide
QQQAQAQ

SEQ ID NO: 1925 - protein, 7 aa, Artificial Sequence
  Description of Artificial Sequence: Synthetic peptide
QQQAQQA

SEQ ID NO: 1926 - protein, 7 aa, Artificial Sequence
  Description of Artificial Sequence: Synthetic peptide
QQQQAAQ

SEQ ID NO: 1927 - protein, 7 aa, Artificial Sequence
  Description of Artificial Sequence: Synthetic peptide
QQQQAQA

SEQ ID NO: 1928 - protein, 7 aa, Artificial Sequence
  Description of Artificial Sequence: Synthetic peptide
QQQQQQA

SEQ ID NO: 1929 - protein, 7 aa, Artificial Sequence
  Description of Artificial Sequence: Synthetic peptide
AQQQQQQ

SEQ ID NO: 1930 - protein, 7 aa, Artificial Sequence
  Description of Artificial Sequence: Synthetic peptide
QAQQQQQ

SEQ ID NO: 1931 - protein, 7 aa, Artificial Sequence
  Description of Artificial Sequence: Synthetic peptide
QQAQQQQ

SEQ ID NO: 1932 - protein, 7 aa, Artificial Sequence
  Description of Artificial Sequence: Synthetic peptide
QQQAQQQ

SEQ ID NO: 1933 - protein, 7 aa, Artificial Sequence
  Description of Artificial Sequence: Synthetic peptide
QQQQAQQ

SEQ ID NO: 1934 - protein, 7 aa, Artificial Sequence
  Description of Artificial Sequence: Synthetic peptide
QQQQQAQ

SEQ ID NO: 1935 - protein, 4 aa, Artificial Sequence
  Description of Artificial Sequence: Synthetic peptide
QQQS

SEQ ID NO: 1936 - protein, 4 aa, Artificial Sequence
  Description of Artificial Sequence: Synthetic peptide
SQQQ

SEQ ID NO: 1937 - protein, 4 aa, Artificial Sequence
  Description of Artificial Sequence: Synthetic peptide
QSQQ

SEQ ID NO: 1938 - protein, 4 aa, Artificial Sequence
  Description of Artificial Sequence: Synthetic peptide
QQSQ

SEQ ID NO: 1939 - protein, 5 aa, Artificial Sequence
  Description of Artificial Sequence: Synthetic peptide
QQQQS

SEQ ID NO: 1940 - protein, 5 aa, Artificial Sequence
  Description of Artificial Sequence: Synthetic peptide
SQQQQ

SEQ ID NO: 1941 - protein, 5 aa, Artificial Sequence
  Description of Artificial Sequence: Synthetic peptide
QSQQQ

SEQ ID NO: 1942 - protein, 5 aa, Artificial Sequence
  Description of Artificial Sequence: Synthetic peptide
QQSQQ

SEQ ID NO: 1943 - protein, 5 aa, Artificial Sequence
  Description of Artificial Sequence: Synthetic peptide
QQQSQ

SEQ ID NO: 1944 - protein, 5 aa, Artificial Sequence
  Description of Artificial Sequence: Synthetic peptide
QQQSS

SEQ ID NO: 1945 - protein, 5 aa, Artificial Sequence
  Description of Artificial Sequence: Synthetic peptide
SSQQQ

SEQ ID NO: 1946 - protein, 5 aa, Artificial Sequence
  Description of Artificial Sequence: Synthetic peptide
SQSQQ

SEQ ID NO: 1947 - protein, 5 aa, Artificial Sequence
  Description of Artificial Sequence: Synthetic peptide
SQQSQ

SEQ ID NO: 1948 - protein, 5 aa, Artificial Sequence
  Description of Artificial Sequence: Synthetic peptide
SQQQS

SEQ ID NO: 1949 - protein, 5 aa, Artificial Sequence
  Description of Artificial Sequence: Synthetic peptide
QSSQQ

SEQ ID NO: 1950 - protein, 5 aa, Artificial Sequence
  Description of Artificial Sequence: Synthetic peptide
QSQSQ

SEQ ID NO: 1951 - protein, 5 aa, Artificial Sequence
  Description of Artificial Sequence: Synthetic peptide
QSQQS

SEQ ID NO: 1952 - protein, 5 aa, Artificial Sequence
  Description of Artificial Sequence: Synthetic peptide
QQSSQ

SEQ ID NO: 1953 - protein, 5 aa, Artificial Sequence
  Description of Artificial Sequence: Synthetic peptide
QQSQS

SEQ ID NO: 1954 - protein, 6 aa, Artificial Sequence
  Description of Artificial Sequence: Synthetic peptide
QQQQQS

SEQ ID NO: 1955 - protein, 6 aa, Artificial Sequence
  Description of Artificial Sequence: Synthetic peptide
SQQQQQ

SEQ ID NO: 1956 - protein, 6 aa, Artificial Sequence
  Description of Artificial Sequence: Synthetic peptide
QSQQQQ

SEQ ID NO: 1957 - protein, 6 aa, Artificial Sequence
  Description of Artificial Sequence: Synthetic peptide
QQSQQQ

SEQ ID NO: 1958 - protein, 6 aa, Artificial Sequence
  Description of Artificial Sequence: Synthetic peptide
QQQSQQ

SEQ ID NO: 1959 - protein, 6 aa, Artificial Sequence
  Description of Artificial Sequence: Synthetic peptide
QQQQSQ

SEQ ID NO: 1960 - protein, 6 aa, Artificial Sequence
  Description of Artificial Sequence: Synthetic peptide
QQQQSS

SEQ ID NO: 1961 - protein, 6 aa, Artificial Sequence
  Description of Artificial Sequence: Synthetic peptide
SSQQQQ

SEQ ID NO: 1962 - protein, 6 aa, Artificial Sequence
  Description of Artificial Sequence: Synthetic peptide
SQSQQQ

SEQ ID NO: 1963 - protein, 6 aa, Artificial Sequence
  Description of Artificial Sequence: Synthetic peptide
SQQSQQ

SEQ ID NO: 1964 - protein, 6 aa, Artificial Sequence
  Description of Artificial Sequence: Synthetic peptide
SQQQSQ

SEQ ID NO: 1965 - protein, 6 aa, Artificial Sequence
  Description of Artificial Sequence: Synthetic peptide
SQQQQS

SEQ ID NO: 1966 - protein, 6 aa, Artificial Sequence
  Description of Artificial Sequence: Synthetic peptide
QSSQQQ

SEQ ID NO: 1967 - protein, 6 aa, Artificial Sequence
  Description of Artificial Sequence: Synthetic peptide
QSQSQQ

SEQ ID NO: 1968 - protein, 6 aa, Artificial Sequence
  Description of Artificial Sequence: Synthetic peptide
QSQQSQ

SEQ ID NO: 1969 - protein, 6 aa, Artificial Sequence
  Description of Artificial Sequence: Synthetic peptide
QSQQQS

SEQ ID NO: 1970 - protein, 6 aa, Artificial Sequence
  Description of Artificial Sequence: Synthetic peptide
QQSSQQ

SEQ ID NO: 1971 - protein, 6 aa, Artificial Sequence
  Description of Artificial Sequence: Synthetic peptide
QQSQSQ

SEQ ID NO: 1972 - protein, 6 aa, Artificial Sequence
  Description of Artificial Sequence: Synthetic peptide
QQSQQS

SEQ ID NO: 1973 - protein, 6 aa, Artificial Sequence
  Description of Artificial Sequence: Synthetic peptide
QQQSSQ

SEQ ID NO: 1974 - protein, 6 aa, Artificial Sequence
  Description of Artificial Sequence: Synthetic peptide
QQQSQS

SEQ ID NO: 1975 - protein, 7 aa, Artificial Sequence
  Description of Artificial Sequence: Synthetic peptide
QQQQSSS

SEQ ID NO: 1976 - protein, 7 aa, Artificial Sequence
  Description of Artificial Sequence: Synthetic peptide
SSSQQQQ

SEQ ID NO: 1977 - protein, 7 aa, Artificial Sequence
  Description of Artificial Sequence: Synthetic peptide
SQSSQQQ

SEQ ID NO: 1978 - protein, 7 aa, Artificial Sequence
  Description of Artificial Sequence: Synthetic peptide
SQSQSQQ

SEQ ID NO: 1979 - protein, 7 aa, Artificial Sequence
  Description of Artificial Sequence: Synthetic peptide
SQSQQSQ

SEQ ID NO: 1980 - protein, 7 aa, Artificial Sequence
  Description of Artificial Sequence: Synthetic peptide
SQSQQQS

SEQ ID NO: 1981 - protein, 7 aa, Artificial Sequence
  Description of Artificial Sequence: Synthetic peptide
SQQSSQQ

SEQ ID NO: 1982 - protein, 7 aa, Artificial Sequence
  Description of Artificial Sequence: Synthetic peptide
SQQSQSQ

SEQ ID NO: 1983 - protein, 7 aa, Artificial Sequence
  Description of Artificial Sequence: Synthetic peptide
SQQSQQS

SEQ ID NO: 1984 - protein, 7 aa, Artificial Sequence
  Description of Artificial Sequence: Synthetic peptide
SQQQSQS

SEQ ID NO: 1985 - protein, 7 aa, Artificial Sequence
  Description of Artificial Sequence: Synthetic peptide
SQQQSSQ

SEQ ID NO: 1986 - protein, 7 aa, Artificial Sequence
  Description of Artificial Sequence: Synthetic peptide
SQQQQSS

SEQ ID NO: 1987 - protein, 7 aa, Artificial Sequence
  Description of Artificial Sequence: Synthetic peptide
SSQSQQQ

SEQ ID NO: 1988 - protein, 7 aa, Artificial Sequence
  Description of Artificial Sequence: Synthetic peptide
SSQQSQQ

SEQ ID NO: 1989 - protein, 7 aa, Artificial Sequence
  Description of Artificial Sequence: Synthetic peptide
SSQQQSQ

SEQ ID NO: 1990 - protein, 7 aa, Artificial Sequence
  Description of Artificial Sequence: Synthetic peptide
SSQQQQS

SEQ ID NO: 1991 - protein, 7 aa, Artificial Sequence
  Description of Artificial Sequence: Synthetic peptide
QSSSQQQ

SEQ ID NO: 1992 - protein, 7 aa, Artificial Sequence
  Description of Artificial Sequence: Synthetic peptide
QSSQSQQ

SEQ ID NO: 1993 - protein, 7 aa, Artificial Sequence
  Description of Artificial Sequence: Synthetic peptide
QSSQQSQ

SEQ ID NO: 1994 - protein, 7 aa, Artificial Sequence
  Description of Artificial Sequence: Synthetic peptide
QSSQQQS

SEQ ID NO: 1995 - protein, 7 aa, Artificial Sequence
  Description of Artificial Sequence: Synthetic peptide
QSQSSQQ

SEQ ID NO: 1996 - protein, 7 aa, Artificial Sequence
  Description of Artificial Sequence: Synthetic peptide
QSQQSSQ

SEQ ID NO: 1997 - protein, 7 aa, Artificial Sequence
  Description of Artificial Sequence: Synthetic peptide
QSQQQSS

SEQ ID NO: 1998 - protein, 7 aa, Artificial Sequence
  Description of Artificial Sequence: Synthetic peptide
QSQSQSQ

SEQ ID NO: 1999 - protein, 7 aa, Artificial Sequence
  Description of Artificial Sequence: Synthetic peptide
QSQSQQS

SEQ ID NO: 2000 - protein, 7 aa, Artificial Sequence
  Description of Artificial Sequence: Synthetic peptide
QSQQSQS

SEQ ID NO: 2001 - protein, 7 aa, Artificial Sequence
  Description of Artificial Sequence: Synthetic peptide
QQSSSQQ

SEQ ID NO: 2002 - protein, 7 aa, Artificial Sequence
  Description of Artificial Sequence: Synthetic peptide
QQSSQSQ

SEQ ID NO: 2003 - protein, 7 aa, Artificial Sequence
  Description of Artificial Sequence: Synthetic peptide
QQSSQQS

SEQ ID NO: 2004 - protein, 7 aa, Artificial Sequence
  Description of Artificial Sequence: Synthetic peptide
QQSQSSQ

SEQ ID NO: 2005 - protein, 7 aa, Artificial Sequence
  Description of Artificial Sequence: Synthetic peptide
QQSQSQS

SEQ ID NO: 2006 - protein, 7 aa, Artificial Sequence
  Description of Artificial Sequence: Synthetic peptide
QQSQQSS

SEQ ID NO: 2007 - protein, 7 aa, Artificial Sequence
  Description of Artificial Sequence: Synthetic peptide
QQQSSSQ

SEQ ID NO: 2008 - protein, 7 aa, Artificial Sequence
  Description of Artificial Sequence: Synthetic peptide
QQQSSQS

SEQ ID NO: 2009 - protein, 7 aa, Artificial Sequence
  Description of Artificial Sequence: Synthetic peptide
QQQSQSS

SEQ ID NO: 2010 - protein, 7 aa, Artificial Sequence
  Description of Artificial Sequence: Synthetic peptide
QQQQQSS

SEQ ID NO: 2011 - protein, 7 aa, Artificial Sequence
  Description of Artificial Sequence: Synthetic peptide
SSQQQQQ

SEQ ID NO: 2012 - protein, 7 aa, Artificial Sequence
  Description of Artificial Sequence: Synthetic peptide
SQSQQQQ

SEQ ID NO: 2013 - protein, 7 aa, Artificial Sequence
  Description of Artificial Sequence: Synthetic peptide
SQQSQQQ

SEQ ID NO: 2014 - protein, 7 aa, Artificial Sequence
  Description of Artificial Sequence: Synthetic peptide
SQQQSQQ

SEQ ID NO: 2015 - protein, 7 aa, Artificial Sequence
  Description of Artificial Sequence: Synthetic peptide
SQQQQSQ

SEQ ID NO: 2016 - protein, 7 aa, Artificial Sequence
  Description of Artificial Sequence: Synthetic peptide
SQQQQQS

SEQ ID NO: 2017 - protein, 7 aa, Artificial Sequence
  Description of Artificial Sequence: Synthetic peptide
QSSQQQQ

SEQ ID NO: 2018 - protein, 7 aa, Artificial Sequence
  Description of Artificial Sequence: Synthetic peptide
QSQSQQQ

SEQ ID NO: 2019 - protein, 7 aa, Artificial Sequence
  Description of Artificial Sequence: Synthetic peptide
QSQQSQQ

SEQ ID NO: 2020 - protein, 7 aa, Artificial Sequence
  Description of Artificial Sequence: Synthetic peptide
QSQQQSQ

SEQ ID NO: 2021 - protein, 7 aa, Artificial Sequence
  Description of Artificial Sequence: Synthetic peptide
QSQQQQS

SEQ ID NO: 2022 - protein, 7 aa, Artificial Sequence
  Description of Artificial Sequence: Synthetic peptide
QQSSQQQ

SEQ ID NO: 2023 - protein, 7 aa, Artificial Sequence
  Description of Artificial Sequence: Synthetic peptide
QQSQSQQ

SEQ ID NO: 2024 - protein, 7 aa, Artificial Sequence
  Description of Artificial Sequence: Synthetic peptide
QQSQQSQ

SEQ ID NO: 2025 - protein, 7 aa, Artificial Sequence
  Description of Artificial Sequence: Synthetic peptide
QQSQQQS

SEQ ID NO: 2026 - protein, 7 aa, Artificial Sequence
  Description of Artificial Sequence: Synthetic peptide
QQQSSQQ

SEQ ID NO: 2027 - protein, 7 aa, Artificial Sequence
  Description of Artificial Sequence: Synthetic peptide
QQQSQSQ

SEQ ID NO: 2028 - protein, 7 aa, Artificial Sequence
  Description of Artificial Sequence: Synthetic peptide
QQQSQQS

SEQ ID NO: 2029 - protein, 7 aa, Artificial Sequence
  Description of Artificial Sequence: Synthetic peptide
QQQQSSQ

SEQ ID NO: 2030 - protein, 7 aa, Artificial Sequence
  Description of Artificial Sequence: Synthetic peptide
QQQQSQS

SEQ ID NO: 2031 - protein, 7 aa, Artificial Sequence
  Description of Artificial Sequence: Synthetic peptide
QQQQQQS

SEQ ID NO: 2032 - protein, 7 aa, Artificial Sequence
  Description of Artificial Sequence: Synthetic peptide
SQQQQQQ

SEQ ID NO: 2033 - protein, 7 aa, Artificial Sequence
  Description of Artificial Sequence: Synthetic peptide
QSQQQQQ

SEQ ID NO: 2034 - protein, 7 aa, Artificial Sequence
  Description of Artificial Sequence: Synthetic peptide
QQSQQQQ

SEQ ID NO: 2035 - protein, 7 aa, Artificial Sequence
  Description of Artificial Sequence: Synthetic peptide
QQQSQQQ

SEQ ID NO: 2036 - protein, 7 aa, Artificial Sequence
  Description of Artificial Sequence: Synthetic peptide
QQQQSQQ

SEQ ID NO: 2037 - protein, 7 aa, Artificial Sequence
  Description of Artificial Sequence: Synthetic peptide
QQQQQSQ

SEQ ID NO: 2038 - protein, 4 aa, Artificial Sequence
  Description of Artificial Sequence: Synthetic peptide
QQQE

SEQ ID NO: 2039 - protein, 4 aa, Artificial Sequence
  Description of Artificial Sequence: Synthetic peptide
EQQQ

SEQ ID NO: 2040 - protein, 4 aa, Artificial Sequence
  Description of Artificial Sequence: Synthetic peptide
QEQQ

SEQ ID NO: 2041 - protein, 4 aa, Artificial Sequence
  Description of Artificial Sequence: Synthetic peptide
QQEQ

SEQ ID NO: 2042 - protein, 5 aa, Artificial Sequence
  Description of Artificial Sequence: Synthetic peptide
QQQQE

SEQ ID NO: 2043 - protein, 5 aa, Artificial Sequence
  Description of Artificial Sequence: Synthetic peptide
EQQQQ

SEQ ID NO: 2044 - protein, 5 aa, Artificial Sequence
  Description of Artificial Sequence: Synthetic peptide
QEQQQ

SEQ ID NO: 2045 - protein, 5 aa, Artificial Sequence
  Description of Artificial Sequence: Synthetic peptide
QQEQQ

SEQ ID NO: 2046 - protein, 5 aa, Artificial Sequence
  Description of Artificial Sequence: Synthetic peptide
QQQEQ

SEQ ID NO: 2047 - protein, 5 aa, Artificial Sequence
  Description of Artificial Sequence: Synthetic peptide
QQQEE

SEQ ID NO: 2048 - protein, 5 aa, Artificial Sequence
  Description of Artificial Sequence: Synthetic peptide
EEQQQ

SEQ ID NO: 2049 - protein, 5 aa, Artificial Sequence
  Description of Artificial Sequence: Synthetic peptide
EQEQQ

SEQ ID NO: 2050 - protein, 5 aa, Artificial Sequence
  Description of Artificial Sequence: Synthetic peptide
EQQEQ

SEQ ID NO: 2051 - protein, 5 aa, Artificial Sequence
  Description of Artificial Sequence: Synthetic peptide
EQQQE

SEQ ID NO: 2052 - protein, 5 aa, Artificial Sequence
  Description of Artificial Sequence: Synthetic peptide
QEEQQ

SEQ ID NO: 2053 - protein, 5 aa, Artificial Sequence
  Description of Artificial Sequence: Synthetic peptide
QEQEQ

SEQ ID NO: 2054 - protein, 5 aa, Artificial Sequence
  Description of Artificial Sequence: Synthetic peptide
QEQQE

SEQ ID NO: 2055 - protein, 5 aa, Artificial Sequence
  Description of Artificial Sequence: Synthetic peptide
QQEEQ

SEQ ID NO: 2056 - protein, 5 aa, Artificial Sequence
  Description of Artificial Sequence: Synthetic peptide
QQEQE

SEQ ID NO: 2057 - protein, 6 aa, Artificial Sequence
  Description of Artificial Sequence: Synthetic peptide
QQQQQE

SEQ ID NO: 2058 - protein, 6 aa, Artificial Sequence
  Description of Artificial Sequence: Synthetic peptide
EQQQQQ

SEQ ID NO: 2059 - protein, 6 aa, Artificial Sequence
  Description of Artificial Sequence: Synthetic peptide
QEQQQQ

SEQ ID NO: 2060 - protein, 6 aa, Artificial Sequence
  Description of Artificial Sequence: Synthetic peptide
QQEQQQ

SEQ ID NO: 2061 - protein, 6 aa, Artificial Sequence
  Description of Artificial Sequence: Synthetic peptide
QQQEQQ

SEQ ID NO: 2062 - protein, 6 aa, Artificial Sequence
  Description of Artificial Sequence: Synthetic peptide
QQQQEQ

SEQ ID NO: 2063 - protein, 6 aa, Artificial Sequence
  Description of Artificial Sequence: Synthetic peptide
QQQQEE

SEQ ID NO: 2064 - protein, 6 aa, Artificial Sequence
  Description of Artificial Sequence: Synthetic peptide
EEQQQQ

SEQ ID NO: 2065 - protein, 6 aa, Artificial Sequence
  Description of Artificial Sequence: Synthetic peptide
EQEQQQ

SEQ ID NO: 2066 - protein, 6 aa, Artificial Sequence
  Description of Artificial Sequence: Synthetic peptide
EQQEQQ

SEQ ID NO: 2067 - protein, 6 aa, Artificial Sequence
  Description of Artificial Sequence: Synthetic peptide
EQQQEQ

SEQ ID NO: 2068 - protein, 6 aa, Artificial Sequence
  Description of Artificial Sequence: Synthetic peptide
EQQQQE

SEQ ID NO: 2069 - protein, 6 aa, Artificial Sequence
  Description of Artificial Sequence: Synthetic peptide
QEEQQQ

SEQ ID NO: 2070 - protein, 6 aa, Artificial Sequence
  Description of Artificial Sequence: Synthetic peptide
QEQEQQ

SEQ ID NO: 2071 - protein, 6 aa, Artificial Sequence
  Description of Artificial Sequence: Synthetic peptide
QEQQEQ

SEQ ID NO: 2072 - protein, 6 aa, Artificial Sequence
  Description of Artificial Sequence: Synthetic peptide
QEQQQE

SEQ ID NO: 2073 - protein, 6 aa, Artificial Sequence
  Description of Artificial Sequence: Synthetic peptide
QQEEQQ

SEQ ID NO: 2074 - protein, 6 aa, Artificial Sequence
  Description of Artificial Sequence: Synthetic peptide
QQEQEQ

SEQ ID NO: 2075 - protein, 6 aa, Artificial Sequence
  Description of Artificial Sequence: Synthetic peptide
QQEQQE

SEQ ID NO: 2076 - protein, 6 aa, Artificial Sequence
  Description of Artificial Sequence: Synthetic peptide
QQQEEQ

SEQ ID NO: 2077 - protein, 6 aa, Artificial Sequence
  Description of Artificial Sequence: Synthetic peptide
QQQEQE

SEQ ID NO: 2078 - protein, 7 aa, Artificial Sequence
  Description of Artificial Sequence: Synthetic peptide
QQQQEEE

SEQ ID NO: 2079 - protein, 7 aa, Artificial Sequence
  Description of Artificial Sequence: Synthetic peptide
EEEQQQQ

SEQ ID NO: 2080 - protein, 7 aa, Artificial Sequence
  Description of Artificial Sequence: Synthetic peptide
EQEEQQQ

SEQ ID NO: 2081 - protein, 7 aa, Artificial Sequence
  Description of Artificial Sequence: Synthetic peptide
EQEQEQQ

SEQ ID NO: 2082 - protein, 7 aa, Artificial Sequence
  Description of Artificial Sequence: Synthetic peptide
EQEQQEQ

SEQ ID NO: 2083 - protein, 7 aa, Artificial Sequence
  Description of Artificial Sequence: Synthetic peptide
EQEQQQE

SEQ ID NO: 2084 - protein, 7 aa, Artificial Sequence
  Description of Artificial Sequence: Synthetic peptide
EQQEEQQ

SEQ ID NO: 2085 - protein, 7 aa, Artificial Sequence
  Description of Artificial Sequence: Synthetic peptide
EQQEQEQ

SEQ ID NO: 2086 - protein, 7 aa, Artificial Sequence
  Description of Artificial Sequence: Synthetic peptide
EQQEQQE

SEQ ID NO: 2087 - protein, 7 aa, Artificial Sequence
  Description of Artificial Sequence: Synthetic peptide
EQQQEQE

SEQ ID NO: 2088 - protein, 7 aa, Artificial Sequence
  Description of Artificial Sequence: Synthetic peptide
EQQQEEQ

SEQ ID NO: 2089 - protein, 7 aa, Artificial Sequence
  Description of Artificial Sequence: Synthetic peptide
EQQQQEE

SEQ ID NO: 2090 - protein, 7 aa, Artificial Sequence
  Description of Artificial Sequence: Synthetic peptide
EEQEQQQ

SEQ ID NO: 2091 - protein, 7 aa, Artificial Sequence
  Description of Artificial Sequence: Synthetic peptide
EEQQEQQ

SEQ ID NO: 2092 - protein, 7 aa, Artificial Sequence
  Description of Artificial Sequence: Synthetic peptide
EEQQQEQ

SEQ ID NO: 2093 - protein, 7 aa, Artificial Sequence
  Description of Artificial Sequence: Synthetic peptide
EEQQQQE

SEQ ID NO: 2094 - protein, 7 aa, Artificial Sequence
  Description of Artificial Sequence: Synthetic peptide
QEEEQQQ

SEQ ID NO: 2095 - protein, 7 aa, Artificial Sequence
  Description of Artificial Sequence: Synthetic peptide
QEEQEQQ

SEQ ID NO: 2096 - protein, 7 aa, Artificial Sequence
  Description of Artificial Sequence: Synthetic peptide
QEEQQEQ

SEQ ID NO: 2097 - protein, 7 aa, Artificial Sequence
  Description of Artificial Sequence: Synthetic peptide
QEEQQQE

SEQ ID NO: 2098 - protein, 7 aa, Artificial Sequence
  Description of Artificial Sequence: Synthetic peptide
QEQEEQQ

SEQ ID NO: 2099 - protein, 7 aa, Artificial Sequence
  Description of Artificial Sequence: Synthetic peptide
QEQQEEQ

SEQ ID NO: 2100 - protein, 7 aa, Artificial Sequence
  Description of Artificial Sequence: Synthetic peptide
QEQQQEE

SEQ ID NO: 2101 - protein, 7 aa, Artificial Sequence
  Description of Artificial Sequence: Synthetic peptide
QEQEQEQ

SEQ ID NO: 2102 - protein, 7 aa, Artificial Sequence
  Description of Artificial Sequence: Synthetic peptide
QEQEQQE

SEQ ID NO: 2103 - protein, 7 aa, Artificial Sequence
  Description of Artificial Sequence: Synthetic peptide
QEQQEQE

SEQ ID NO: 2104 - protein, 7 aa, Artificial Sequence
  Description of Artificial Sequence: Synthetic peptide
QQEEEQQ

SEQ ID NO: 2105 - protein, 7 aa, Artificial Sequence
  Description of Artificial Sequence: Synthetic peptide
QQEEQEQ

SEQ ID NO: 2106 - protein, 7 aa, Artificial Sequence
  Description of Artificial Sequence: Synthetic peptide
QQEEQQE

SEQ ID NO: 2107 - protein, 7 aa, Artificial Sequence
  Description of Artificial Sequence: Synthetic peptide
QQEQEEQ

SEQ ID NO: 2108 - protein, 7 aa, Artificial Sequence
  Description of Artificial Sequence: Synthetic peptide
QQEQEQE

SEQ ID NO: 2109 - protein, 7 aa, Artificial Sequence
  Description of Artificial Sequence: Synthetic peptide
QQEQQEE

SEQ ID NO: 2110 - protein, 7 aa, Artificial Sequence
  Description of Artificial Sequence: Synthetic peptide
QQQEEEQ

SEQ ID NO: 2111 - protein, 7 aa, Artificial Sequence
  Description of Artificial Sequence: Synthetic peptide
QQQEEQE

SEQ ID NO: 2112 - protein, 7 aa, Artificial Sequence
  Description of Artificial Sequence: Synthetic peptide
QQQEQEE

SEQ ID NO: 2113 - protein, 7 aa, Artificial Sequence
  Description of Artificial Sequence: Synthetic peptide
QQQQQEE

SEQ ID NO: 2114 - protein, 7 aa, Artificial Sequence
  Description of Artificial Sequence: Synthetic peptide
EEQQQQQ

SEQ ID NO: 2115 - protein, 7 aa, Artificial Sequence
  Description of Artificial Sequence: Synthetic peptide
EQEQQQQ

SEQ ID NO: 2116 - protein, 7 aa, Artificial Sequence
  Description of Artificial Sequence: Synthetic peptide
EQQEQQQ

SEQ ID NO: 2117 - protein, 7 aa, Artificial Sequence
  Description of Artificial Sequence: Synthetic peptide
EQQQEQQ

SEQ ID NO: 2118 - protein, 7 aa, Artificial Sequence
  Description of Artificial Sequence: Synthetic peptide
EQQQQEQ

SEQ ID NO: 2119 - protein, 7 aa, Artificial Sequence
  Description of Artificial Sequence: Synthetic peptide
EQQQQQE

SEQ ID NO: 2120 - protein, 7 aa, Artificial Sequence
  Description of Artificial Sequence: Synthetic peptide
QEEQQQQ

SEQ ID NO: 2121 - protein, 7 aa, Artificial Sequence
  Description of Artificial Sequence: Synthetic peptide
QEQEQQQ

SEQ ID NO: 2122 - protein, 7 aa, Artificial Sequence
  Description of Artificial Sequence: Synthetic peptide
QEQQEQQ

SEQ ID NO: 2123 - protein, 7 aa, Artificial Sequence
  Description of Artificial Sequence: Synthetic peptide
QEQQQEQ

SEQ ID NO: 2124 - protein, 7 aa, Artificial Sequence
  Description of Artificial Sequence: Synthetic peptide
QEQQQQE

SEQ ID NO: 2125 - protein, 7 aa, Artificial Sequence
  Description of Artificial Sequence: Synthetic peptide
QQEEQQQ

SEQ ID NO: 2126 - protein, 7 aa, Artificial Sequence
  Description of Artificial Sequence: Synthetic peptide
QQEQEQQ

SEQ ID NO: 2127 - protein, 7 aa, Artificial Sequence
  Description of Artificial Sequence: Synthetic peptide
QQEQQEQ

SEQ ID NO: 2128 - protein, 7 aa, Artificial Sequence
  Description of Artificial Sequence: Synthetic peptide
QQEQQQE

SEQ ID NO: 2129 - protein, 7 aa, Artificial Sequence
  Description of Artificial Sequence: Synthetic peptide
QQQEEQQ

SEQ ID NO: 2130 - protein, 7 aa, Artificial Sequence
  Description of Artificial Sequence: Synthetic peptide
QQQEQEQ

SEQ ID NO: 2131 - protein, 7 aa, Artificial Sequence
  Description of Artificial Sequence: Synthetic peptide
QQQEQQE

SEQ ID NO: 2132 - protein, 7 aa, Artificial Sequence
  Description of Artificial Sequence: Synthetic peptide
QQQQEEQ

SEQ ID NO: 2133 - protein, 7 aa, Artificial Sequence
  Description of Artificial Sequence: Synthetic peptide
QQQQEQE

SEQ ID NO: 2134 - protein, 7 aa, Artificial Sequence
  Description of Artificial Sequence: Synthetic peptide
QQQQQQE

SEQ ID NO: 2135 - protein, 7 aa, Artificial Sequence
  Description of Artificial Sequence: Synthetic peptide
EQQQQQQ

SEQ ID NO: 2136 - protein, 7 aa, Artificial Sequence
  Description of Artificial Sequence: Synthetic peptide
QEQQQQQ

SEQ ID NO: 2137 - protein, 7 aa, Artificial Sequence
  Description of Artificial Sequence: Synthetic peptide
QQEQQQQ

SEQ ID NO: 2138 - protein, 7 aa, Artificial Sequence
  Description of Artificial Sequence: Synthetic peptide
QQQEQQQ

SEQ ID NO: 2139 - protein, 7 aa, Artificial Sequence
  Description of Artificial Sequence: Synthetic peptide
QQQQEQQ

SEQ ID NO: 2140 - protein, 7 aa, Artificial Sequence
  Description of Artificial Sequence: Synthetic peptide
QQQQQEQ

SEQ ID NO: 2141 - protein, 4 aa, Artificial Sequence
  Description of Artificial Sequence: Synthetic peptide
QQQH

SEQ ID NO: 2142 - protein, 4 aa, Artificial Sequence
  Description of Artificial Sequence: Synthetic peptide
HQQQ

SEQ ID NO: 2143 - protein, 4 aa, Artificial Sequence
  Description of Artificial Sequence: Synthetic peptide
QHQQ

SEQ ID NO: 2144 - protein, 4 aa, Artificial Sequence
  Description of Artificial Sequence: Synthetic peptide
QQHQ

SEQ ID NO: 2145 - protein, 5 aa, Artificial Sequence
  Description of Artificial Sequence: Synthetic peptide
QQQQH

SEQ ID NO: 2146 - protein, 5 aa, Artificial Sequence
  Description of Artificial Sequence: Synthetic peptide
HQQQQ

SEQ ID NO: 2147 - protein, 5 aa, Artificial Sequence
  Description of Artificial Sequence: Synthetic peptide
QHQQQ

SEQ ID NO: 2148 - protein, 5 aa, Artificial Sequence
  Description of Artificial Sequence: Synthetic peptide
QQHQQ

SEQ ID NO: 2149 - protein, 5 aa, Artificial Sequence
  Description of Artificial Sequence: Synthetic peptide
QQQHQ

SEQ ID NO: 2150 - protein, 5 aa, Artificial Sequence
  Description of Artificial Sequence: Synthetic peptide
QQQHH

SEQ ID NO: 2151 - protein, 5 aa, Artificial Sequence
  Description of Artificial Sequence: Synthetic peptide
HHQQQ

SEQ ID NO: 2152 - protein, 5 aa, Artificial Sequence
  Description of Artificial Sequence: Synthetic peptide
HQHQQ

SEQ ID NO: 2153 - protein, 5 aa, Artificial Sequence
  Description of Artificial Sequence: Synthetic peptide
HQQHQ

SEQ ID NO: 2154 - protein, 5 aa, Artificial Sequence
  Description of Artificial Sequence: Synthetic peptide
HQQQH

SEQ ID NO: 2155 - protein, 5 aa, Artificial Sequence
  Description of Artificial Sequence: Synthetic peptide
QHHQQ

SEQ ID NO: 2156 - protein, 5 aa, Artificial Sequence
  Description of Artificial Sequence: Synthetic peptide
QHQHQ

SEQ ID NO: 2157 - protein, 5 aa, Artificial Sequence
  Description of Artificial Sequence: Synthetic peptide
QHQQH

SEQ ID NO: 2158 - protein, 5 aa, Artificial Sequence
  Description of Artificial Sequence: Synthetic peptide
QQHHQ

SEQ ID NO: 2159 - protein, 5 aa, Artificial Sequence
  Description of Artificial Sequence: Synthetic peptide
QQHQH

SEQ ID NO: 2160 - protein, 6 aa, Artificial Sequence
  Description of Artificial Sequence: Synthetic peptide
QQQQQH

SEQ ID NO: 2161 - protein, 6 aa, Artificial Sequence
  Description of Artificial Sequence: Synthetic peptide
HQQQQQ

SEQ ID NO: 2162 - protein, 6 aa, Artificial Sequence
  Description of Artificial Sequence: Synthetic peptide
QHQQQQ

SEQ ID NO: 2163 - protein, 6 aa, Artificial Sequence
  Description of Artificial Sequence: Synthetic peptide
QQHQQQ

SEQ ID NO: 2164 - protein, 6 aa, Artificial Sequence
  Description of Artificial Sequence: Synthetic peptide
QQQHQQ

SEQ ID NO: 2165 - protein, 6 aa, Artificial Sequence
  Description of Artificial Sequence: Synthetic peptide
QQQQHQ

SEQ ID NO: 2166 - protein, 6 aa, Artificial Sequence
  Description of Artificial Sequence: Synthetic peptide
QQQQHH

SEQ ID NO: 2167 - protein, 6 aa, Artificial Sequence
  Description of Artificial Sequence: Synthetic peptide
HHQQQQ

SEQ ID NO: 2168 - protein, 6 aa, Artificial Sequence
  Description of Artificial Sequence: Synthetic peptide
HQHQQQ

SEQ ID NO: 2169 - protein, 6 aa, Artificial Sequence
  Description of Artificial Sequence: Synthetic peptide
HQQHQQ

SEQ ID NO: 2170 - protein, 6 aa, Artificial Sequence
  Description of Artificial Sequence: Synthetic peptide
HQQQHQ

SEQ ID NO: 2171 - protein, 6 aa, Artificial Sequence
  Description of Artificial Sequence: Synthetic peptide
HQQQQH

SEQ ID NO: 2172 - protein, 6 aa, Artificial Sequence
  Description of Artificial Sequence: Synthetic peptide
QHHQQQ

SEQ ID NO: 2173 - protein, 6 aa, Artificial Sequence
  Description of Artificial Sequence: Synthetic peptide
QHQHQQ

SEQ ID NO: 2174 - protein, 6 aa, Artificial Sequence
  Description of Artificial Sequence: Synthetic peptide
QHQQHQ

SEQ ID NO: 2175 - protein, 6 aa, Artificial Sequence
  Description of Artificial Sequence: Synthetic peptide
QHQQQH

SEQ ID NO: 2176 - protein, 6 aa, Artificial Sequence
  Description of Artificial Sequence: Synthetic peptide
QQHHQQ

SEQ ID NO: 2177 - protein, 6 aa, Artificial Sequence
  Description of Artificial Sequence: Synthetic peptide
QQHQHQ

SEQ ID NO: 2178 - protein, 6 aa, Artificial Sequence
  Description of Artificial Sequence: Synthetic peptide
QQHQQH

SEQ ID NO: 2179 - protein, 6 aa, Artificial Sequence
  Description of Artificial Sequence: Synthetic peptide
QQQHHQ

SEQ ID NO: 2180 - protein, 6 aa, Artificial Sequence
  Description of Artificial Sequence: Synthetic peptide
QQQHQH

SEQ ID NO: 2181 - protein, 7 aa, Artificial Sequence
  Description of Artificial Sequence: Synthetic peptide
QQQQHHH

SEQ ID NO: 2182 - protein, 7 aa, Artificial Sequence
  Description of Artificial Sequence: Synthetic peptide
HHHQQQQ

SEQ ID NO: 2183 - protein, 7 aa, Artificial Sequence
  Description of Artificial Sequence: Synthetic peptide
HQHHQQQ

SEQ ID NO: 2184 - protein, 7 aa, Artificial Sequence
  Description of Artificial Sequence: Synthetic peptide
HQHQHQQ

SEQ ID NO: 2185 - protein, 7 aa, Artificial Sequence
  Description of Artificial Sequence: Synthetic peptide
HQHQQHQ

SEQ ID NO: 2186 - protein, 7 aa, Artificial Sequence
  Description of Artificial Sequence: Synthetic peptide
HQHQQQH

SEQ ID NO: 2187 - protein, 7 aa, Artificial Sequence
  Description of Artificial Sequence: Synthetic peptide
HQQHHQQ

SEQ ID NO: 2188 - protein, 7 aa, Artificial Sequence
  Description of Artificial Sequence: Synthetic peptide
HQQHQHQ

SEQ ID NO: 2189 - protein, 7 aa, Artificial Sequence
  Description of Artificial Sequence: Synthetic peptide
HQQHQQH

SEQ ID NO: 2190 - protein, 7 aa, Artificial Sequence
  Description of Artificial Sequence: Synthetic peptide
HQQQHQH

SEQ ID NO: 2191 - protein, 7 aa, Artificial Sequence
  Description of Artificial Sequence: Synthetic peptide
HQQQHHQ

SEQ ID NO: 2192 - protein, 7 aa, Artificial Sequence
  Description of Artificial Sequence: Synthetic peptide
HQQQQHH

SEQ ID NO: 2193 - protein, 7 aa, Artificial Sequence
  Description of Artificial Sequence: Synthetic peptide
HHQHQQQ

SEQ ID NO: 2194 - protein, 7 aa, Artificial Sequence
  Description of Artificial Sequence: Synthetic peptide
HHQQHQQ

SEQ ID NO: 2195 - protein, 7 aa, Artificial Sequence
  Description of Artificial Sequence: Synthetic peptide
HHQQQHQ

SEQ ID NO: 2196 - protein, 7 aa, Artificial Sequence
  Description of Artificial Sequence: Synthetic peptide
HHQQQQH

SEQ ID NO: 2197 - protein, 7 aa, Artificial Sequence
  Description of Artificial Sequence: Synthetic peptide
QHHHQQQ

SEQ ID NO: 2198 - protein, 7 aa, Artificial Sequence
  Description of Artificial Sequence: Synthetic peptide
QHHQHQQ

SEQ ID NO: 2199 - protein, 7 aa, Artificial Sequence
  Description of Artificial Sequence: Synthetic peptide
QHHQQHQ

SEQ ID NO: 2200 - protein, 7 aa, Artificial Sequence
  Description of Artificial Sequence: Synthetic peptide
QHHQQQH

SEQ ID NO: 2201 - protein, 7 aa, Artificial Sequence
  Description of Artificial Sequence: Synthetic peptide
QHQHHQQ

SEQ ID NO: 2202 - protein, 7 aa, Artificial Sequence
  Description of Artificial Sequence: Synthetic peptide
QHQQHHQ

SEQ ID NO: 2203 - protein, 7 aa, Artificial Sequence
  Description of Artificial Sequence: Synthetic peptide
QHQQQHH

SEQ ID NO: 2204 - protein, 7 aa, Artificial Sequence
  Description of Artificial Sequence: Synthetic peptide
QHQHQHQ

SEQ ID NO: 2205 - protein, 7 aa, Artificial Sequence
  Description of Artificial Sequence: Synthetic peptide
QHQHQQH

SEQ ID NO: 2206 - protein, 7 aa, Artificial Sequence
  Description of Artificial Sequence: Synthetic peptide
QHQQHQH

SEQ ID NO: 2207 - protein, 7 aa, Artificial Sequence
  Description of Artificial Sequence: Synthetic peptide
QQHHHQQ

SEQ ID NO: 2208 - protein, 7 aa, Artificial Sequence
  Description of Artificial Sequence: Synthetic peptide
QQHHQHQ

SEQ ID NO: 2209 - protein, 7 aa, Artificial Sequence
  Description of Artificial Sequence: Synthetic peptide
QQHHQQH

SEQ ID NO: 2210 - protein, 7 aa, Artificial Sequence
  Description of Artificial Sequence: Synthetic peptide
QQHQHHQ

SEQ ID NO: 2211 - protein, 7 aa, Artificial Sequence
  Description of Artificial Sequence: Synthetic peptide
QQHQHQH

SEQ ID NO: 2212 - protein, 7 aa, Artificial Sequence
  Description of Artificial Sequence: Synthetic peptide
QQHQQHH

SEQ ID NO: 2213 - protein, 7 aa, Artificial Sequence
  Description of Artificial Sequence: Synthetic peptide
QQQHHHQ

SEQ ID NO: 2214 - protein, 7 aa, Artificial Sequence
  Description of Artificial Sequence: Synthetic peptide
QQQHHQH

SEQ ID NO: 2215 - protein, 7 aa, Artificial Sequence
  Description of Artificial Sequence: Synthetic peptide
QQQHQHH

SEQ ID NO: 2216 - protein, 7 aa, Artificial Sequence
  Description of Artificial Sequence: Synthetic peptide
QQQQQHH

SEQ ID NO: 2217 - protein, 7 aa, Artificial Sequence
  Description of Artificial Sequence: Synthetic peptide
HHQQQQQ

SEQ ID NO: 2218 - protein, 7 aa, Artificial Sequence
  Description of Artificial Sequence: Synthetic peptide
HQHQQQQ

SEQ ID NO: 2219 - protein, 7 aa, Artificial Sequence
  Description of Artificial Sequence: Synthetic peptide
HQQHQQQ

SEQ ID NO: 2220 - protein, 7 aa, Artificial Sequence
  Description of Artificial Sequence: Synthetic peptide
HQQQHQQ

SEQ ID NO: 2221 - protein, 7 aa, Artificial Sequence
  Description of Artificial Sequence: Synthetic peptide
HQQQQHQ

SEQ ID NO: 2222 - protein, 7 aa, Artificial Sequence
  Description of Artificial Sequence: Synthetic peptide
HQQQQQH

SEQ ID NO: 2223 - protein, 7 aa, Artificial Sequence
  Description of Artificial Sequence: Synthetic peptide
QHHQQQQ

SEQ ID NO: 2224 - protein, 7 aa, Artificial Sequence
  Description of Artificial Sequence: Synthetic peptide
QHQHQQQ

SEQ ID NO: 2225 - protein, 7 aa, Artificial Sequence
  Description of Artificial Sequence: Synthetic peptide
QHQQHQQ

SEQ ID NO: 2226 - protein, 7 aa, Artificial Sequence
  Description of Artificial Sequence: Synthetic peptide
QHQQQHQ

SEQ ID NO: 2227 - protein, 7 aa, Artificial Sequence
  Description of Artificial Sequence: Synthetic peptide
QHQQQQH

SEQ ID NO: 2228 - protein, 7 aa, Artificial Sequence
  Description of Artificial Sequence: Synthetic peptide
QQHHQQQ

SEQ ID NO: 2229 - protein, 7 aa, Artificial Sequence
  Description of Artificial Sequence: Synthetic peptide
QQHQHQQ

SEQ ID NO: 2230 - protein, 7 aa, Artificial Sequence
  Description of Artificial Sequence: Synthetic peptide
QQHQQHQ

SEQ ID NO: 2231 - protein, 7 aa, Artificial Sequence
  Description of Artificial Sequence: Synthetic peptide
QQHQQQH

SEQ ID NO: 2232 - protein, 7 aa, Artificial Sequence
  Description of Artificial Sequence: Synthetic peptide
QQQHHQQ

SEQ ID NO: 2233 - protein, 7 aa, Artificial Sequence
  Description of Artificial Sequence: Synthetic peptide
QQQHQHQ

SEQ ID NO: 2234 - protein, 7 aa, Artificial Sequence
  Description of Artificial Sequence: Synthetic peptide
QQQHQQH

SEQ ID NO: 2235 - protein, 7 aa, Artificial Sequence
  Description of Artificial Sequence: Synthetic peptide
QQQQHHQ

SEQ ID NO: 2236 - protein, 7 aa, Artificial Sequence
  Description of Artificial Sequence: Synthetic peptide
QQQQHQH

SEQ ID NO: 2237 - protein, 7 aa, Artificial Sequence
  Description of Artificial Sequence: Synthetic peptide
QQQQQQH

SEQ ID NO: 2238 - protein, 7 aa, Artificial Sequence
  Description of Artificial Sequence: Synthetic peptide
HQQQQQQ

SEQ ID NO: 2239 - protein, 7 aa, Artificial Sequence
  Description of Artificial Sequence: Synthetic peptide
QHQQQQQ

SEQ ID NO: 2240 - protein, 7 aa, Artificial Sequence
  Description of Artificial Sequence: Synthetic peptide
QQHQQQQ

SEQ ID NO: 2241 - protein, 7 aa, Artificial Sequence
  Description of Artificial Sequence: Synthetic peptide
QQQHQQQ

SEQ ID NO: 2242 - protein, 7 aa, Artificial Sequence
  Description of Artificial Sequence: Synthetic peptide
QQQQHQQ

SEQ ID NO: 2243 - protein, 7 aa, Artificial Sequence
  Description of Artificial Sequence: Synthetic peptide
QQQQQHQ

SEQ ID NO: 2244 - protein, 4 aa, Artificial Sequence
  Description of Artificial Sequence: Synthetic peptide
QQQN

SEQ ID NO: 2245 - protein, 4 aa, Artificial Sequence
  Description of Artificial Sequence: Synthetic peptide
NQQQ

SEQ ID NO: 2246 - protein, 4 aa, Artificial Sequence
  Description of Artificial Sequence: Synthetic peptide
QNQQ

SEQ ID NO: 2247 - protein, 4 aa, Artificial Sequence
  Description of Artificial Sequence: Synthetic peptide
QQNQ

SEQ ID NO: 2248 - protein, 5 aa, Artificial Sequence
  Description of Artificial Sequence: Synthetic peptide
QQQQN

SEQ ID NO: 2249 - protein, 5 aa, Artificial Sequence
  Description of Artificial Sequence: Synthetic peptide
NQQQQ

SEQ ID NO: 2250 - protein, 5 aa, Artificial Sequence
  Description of Artificial Sequence: Synthetic peptide
QNQQQ

SEQ ID NO: 2251 - protein, 5 aa, Artificial Sequence
  Description of Artificial Sequence: Synthetic peptide
QQNQQ

SEQ ID NO: 2252 - protein, 5 aa, Artificial Sequence
  Description of Artificial Sequence: Synthetic peptide
QQQNQ

SEQ ID NO: 2253 - protein, 5 aa, Artificial Sequence
  Description of Artificial Sequence: Synthetic peptide
QQQNN

SEQ ID NO: 2254 - protein, 5 aa, Artificial Sequence
  Description of Artificial Sequence: Synthetic peptide
NNQQQ

SEQ ID NO: 2255 - protein, 5 aa, Artificial Sequence
  Description of Artificial Sequence: Synthetic peptide
NQNQQ

SEQ ID NO: 2256 - protein, 5 aa, Artificial Sequence
  Description of Artificial Sequence: Synthetic peptide
NQQNQ

SEQ ID NO: 2257 - protein, 5 aa, Artificial Sequence
  Description of Artificial Sequence: Synthetic peptide
NQQQN

SEQ ID NO: 2258 - protein, 5 aa, Artificial Sequence
  Description of Artificial Sequence: Synthetic peptide
QNNQQ

SEQ ID NO: 2259 - protein, 5 aa, Artificial Sequence
  Description of Artificial Sequence: Synthetic peptide
QNQNQ

SEQ ID NO: 2260 - protein, 5 aa, Artificial Sequence
  Description of Artificial Sequence: Synthetic peptide
QNQQN

SEQ ID NO: 2261 - protein, 5 aa, Artificial Sequence
  Description of Artificial Sequence: Synthetic peptide
QQNNQ

SEQ ID NO: 2262 - protein, 5 aa, Artificial Sequence
  Description of Artificial Sequence: Synthetic peptide
QQNQN

SEQ ID NO: 2263 - protein, 6 aa, Artificial Sequence
  Description of Artificial Sequence: Synthetic peptide
QQQQQN

SEQ ID NO: 2264 - protein, 6 aa, Artificial Sequence
  Description of Artificial Sequence: Synthetic peptide
NQQQQQ

SEQ ID NO: 2265 - protein, 6 aa, Artificial Sequence
  Description of Artificial Sequence: Synthetic peptide
QNQQQQ

SEQ ID NO: 2266 - protein, 6 aa, Artificial Sequence
  Description of Artificial Sequence: Synthetic peptide
QQNQQQ

SEQ ID NO: 2267 - protein, 6 aa, Artificial Sequence
  Description of Artificial Sequence: Synthetic peptide
QQQNQQ

SEQ ID NO: 2268 - protein, 6 aa, Artificial Sequence
  Description of Artificial Sequence: Synthetic peptide
QQQQNQ

SEQ ID NO: 2269 - protein, 6 aa, Artificial Sequence
  Description of Artificial Sequence: Synthetic peptide
QQQQNN

SEQ ID NO: 2270 - protein, 6 aa, Artificial Sequence
  Description of Artificial Sequence: Synthetic peptide
NNQQQQ

SEQ ID NO: 2271 - protein, 6 aa, Artificial Sequence
  Description of Artificial Sequence: Synthetic peptide
NQNQQQ

SEQ ID NO: 2272 - protein, 6 aa, Artificial Sequence
  Description of Artificial Sequence: Synthetic peptide
NQQNQQ

SEQ ID NO: 2273 - protein, 6 aa, Artificial Sequence
  Description of Artificial Sequence: Synthetic peptide
NQQQNQ

SEQ ID NO: 2274 - protein, 6 aa, Artificial Sequence
  Description of Artificial Sequence: Synthetic peptide
NQQQQN

SEQ ID NO: 2275 - protein, 6 aa, Artificial Sequence
  Description of Artificial Sequence: Synthetic peptide
QNNQQQ

SEQ ID NO: 2276 - protein, 6 aa, Artificial Sequence
  Description of Artificial Sequence: Synthetic peptide
QNQNQQ

SEQ ID NO: 2277 - protein, 6 aa, Artificial Sequence
  Description of Artificial Sequence: Synthetic peptide
QNQQNQ

SEQ ID NO: 2278 - protein, 6 aa, Artificial Sequence
  Description of Artificial Sequence: Synthetic peptide
QNQQQN

SEQ ID NO: 2279 - protein, 6 aa, Artificial Sequence
  Description of Artificial Sequence: Synthetic peptide
QQNNQQ

SEQ ID NO: 2280 - protein, 6 aa, Artificial Sequence
  Description of Artificial Sequence: Synthetic peptide
QQNQNQ

SEQ ID NO: 2281 - protein, 6 aa, Artificial Sequence
  Description of Artificial Sequence: Synthetic peptide
QQNQQN

SEQ ID NO: 2282 - protein, 6 aa, Artificial Sequence
  Description of Artificial Sequence: Synthetic peptide
QQQNNQ

SEQ ID NO: 2283 - protein, 6 aa, Artificial Sequence
  Description of Artificial Sequence: Synthetic peptide
QQQNQN

SEQ ID NO: 2284 - protein, 7 aa, Artificial Sequence
  Description of Artificial Sequence: Synthetic peptide
QQQQNNN

SEQ ID NO: 2285 - protein, 7 aa, Artificial Sequence
  Description of Artificial Sequence: Synthetic peptide
NNNQQQQ

SEQ ID NO: 2286 - protein, 7 aa, Artificial Sequence
  Description of Artificial Sequence: Synthetic peptide
NQNNQQQ

SEQ ID NO: 2287 - protein, 7 aa, Artificial Sequence
  Description of Artificial Sequence: Synthetic peptide
NQNQNQQ

SEQ ID NO: 2288 - protein, 7 aa, Artificial Sequence
  Description of Artificial Sequence: Synthetic peptide
NQNQQNQ

SEQ ID NO: 2289 - protein, 7 aa, Artificial Sequence
  Description of Artificial Sequence: Synthetic peptide
NQNQQQN

SEQ ID NO: 2290 - protein, 7 aa, Artificial Sequence
  Description of Artificial Sequence: Synthetic peptide
NQQNNQQ

SEQ ID NO: 2291 - protein, 7 aa, Artificial Sequence
  Description of Artificial Sequence: Synthetic peptide
NQQNQNQ

SEQ ID NO: 2292 - protein, 7 aa, Artificial Sequence
  Description of Artificial Sequence: Synthetic peptide
NQQNQQN

SEQ ID NO: 2293 - protein, 7 aa, Artificial Sequence
  Description of Artificial Sequence: Synthetic peptide
NQQQNQN

SEQ ID NO: 2294 - protein, 7 aa, Artificial Sequence
  Description of Artificial Sequence: Synthetic peptide
NQQQNNQ

SEQ ID NO: 2295 - protein, 7 aa, Artificial Sequence
  Description of Artificial Sequence: Synthetic peptide
NQQQQNN

SEQ ID NO: 2296 - protein, 7 aa, Artificial Sequence
  Description of Artificial Sequence: Synthetic peptide
NNQNQQQ

SEQ ID NO: 2297 - protein, 7 aa, Artificial Sequence
  Description of Artificial Sequence: Synthetic peptide
NNQQNQQ

SEQ ID NO: 2298 - protein, 7 aa, Artificial Sequence
  Description of Artificial Sequence: Synthetic peptide
NNQQQNQ

SEQ ID NO: 2299 - protein, 7 aa, Artificial Sequence
  Description of Artificial Sequence: Synthetic peptide
NNQQQQN

SEQ ID NO: 2300 - protein, 7 aa, Artificial Sequence
  Description of Artificial Sequence: Synthetic peptide
QNNNQQQ

SEQ ID NO: 2301 - protein, 7 aa, Artificial Sequence
  Description of Artificial Sequence: Synthetic peptide
QNNQNQQ

SEQ ID NO: 2302 - protein, 7 aa, Artificial Sequence
  Description of Artificial Sequence: Synthetic peptide
QNNQQNQ

SEQ ID NO: 2303 - protein, 7 aa, Artificial Sequence
  Description of Artificial Sequence: Synthetic peptide
QNNQQQN

SEQ ID NO: 2304 - protein, 7 aa, Artificial Sequence
  Description of Artificial Sequence: Synthetic peptide
QNQNNQQ

SEQ ID NO: 2305 - protein, 7 aa, Artificial Sequence
  Description of Artificial Sequence: Synthetic peptide
QNQQNNQ

SEQ ID NO: 2306 - protein, 7 aa, Artificial Sequence
  Description of Artificial Sequence: Synthetic peptide
QNQQQNN

SEQ ID NO: 2307 - protein, 7 aa, Artificial Sequence
  Description of Artificial Sequence: Synthetic peptide
QNQNQNQ

SEQ ID NO: 2308 - protein, 7 aa, Artificial Sequence
  Description of Artificial Sequence: Synthetic peptide
QNQNQQN

SEQ ID NO: 2309 - protein, 7 aa, Artificial Sequence
  Description of Artificial Sequence: Synthetic peptide
QNQQNQN

SEQ ID NO: 2310 - protein, 7 aa, Artificial Sequence
  Description of Artificial Sequence: Synthetic peptide
QQNNNQQ

SEQ ID NO: 2311 - protein, 7 aa, Artificial Sequence
  Description of Artificial Sequence: Synthetic peptide
QQNNQNQ

SEQ ID NO: 2312 - protein, 7 aa, Artificial Sequence
  Description of Artificial Sequence: Synthetic peptide
QQNNQQN

SEQ ID NO: 2313 - protein, 7 aa, Artificial Sequence
  Description of Artificial Sequence: Synthetic peptide
QQNQNNQ

SEQ ID NO: 2314 - protein, 7 aa, Artificial Sequence
  Description of Artificial Sequence: Synthetic peptide
QQNQNQN

SEQ ID NO: 2315 - protein, 7 aa, Artificial Sequence
  Description of Artificial Sequence: Synthetic peptide
QQNQQNN

SEQ ID NO: 2316 - protein, 7 aa, Artificial Sequence
  Description of Artificial Sequence: Synthetic peptide
QQQNNNQ

SEQ ID NO: 2317 - protein, 7 aa, Artificial Sequence
  Description of Artificial Sequence: Synthetic peptide
QQQNNQN

SEQ ID NO: 2318 - protein, 7 aa, Artificial Sequence
  Description of Artificial Sequence: Synthetic peptide
QQQNQNN

SEQ ID NO: 2319 - protein, 7 aa, Artificial Sequence
  Description of Artificial Sequence: Synthetic peptide
QQQQQNN

SEQ ID NO: 2320 - protein, 7 aa, Artificial Sequence
  Description of Artificial Sequence: Synthetic peptide
NNQQQQQ

SEQ ID NO: 2321 - protein, 7 aa, Artificial Sequence
  Description of Artificial Sequence: Synthetic peptide
NQNQQQQ

SEQ ID NO: 2322 - protein, 7 aa, Artificial Sequence
  Description of Artificial Sequence: Synthetic peptide
NQQNQQQ

SEQ ID NO: 2323 - protein, 7 aa, Artificial Sequence
  Description of Artificial Sequence: Synthetic peptide
NQQQNQQ

SEQ ID NO: 2324 - protein, 7 aa, Artificial Sequence
  Description of Artificial Sequence: Synthetic peptide
NQQQQNQ

SEQ ID NO: 2325 - protein, 7 aa, Artificial Sequence
  Description of Artificial Sequence: Synthetic peptide
NQQQQQN

SEQ ID NO: 2326 - protein, 7 aa, Artificial Sequence
  Description of Artificial Sequence: Synthetic peptide
QNNQQQQ

SEQ ID NO: 2327 - protein, 7 aa, Artificial Sequence
  Description of Artificial Sequence: Synthetic peptide
QNQNQQQ

SEQ ID NO: 2328 - protein, 7 aa, Artificial Sequence
  Description of Artificial Sequence: Synthetic peptide
QNQQNQQ

SEQ ID NO: 2329 - protein, 7 aa, Artificial Sequence
  Description of Artificial Sequence: Synthetic peptide
QNQQQNQ

SEQ ID NO: 2330 - protein, 7 aa, Artificial Sequence
  Description of Artificial Sequence: Synthetic peptide
QNQQQQN

SEQ ID NO: 2331 - protein, 7 aa, Artificial Sequence
  Description of Artificial Sequence: Synthetic peptide
QQNNQQQ

SEQ ID NO: 2332 - protein, 7 aa, Artificial Sequence
  Description of Artificial Sequence: Synthetic peptide
QQNQNQQ

SEQ ID NO: 2333 - protein, 7 aa, Artificial Sequence
  Description of Artificial Sequence: Synthetic peptide
QQNQQNQ

SEQ ID NO: 2334 - protein, 7 aa, Artificial Sequence
  Description of Artificial Sequence: Synthetic peptide
QQNQQQN

SEQ ID NO: 2335 - protein, 7 aa, Artificial Sequence
  Description of Artificial Sequence: Synthetic peptide
QQQNNQQ

SEQ ID NO: 2336 - protein, 7 aa, Artificial Sequence
  Description of Artificial Sequence: Synthetic peptide
QQQNQNQ

SEQ ID NO: 2337 - protein, 7 aa, Artificial Sequence
  Description of Artificial Sequence: Synthetic peptide
QQQNQQN

SEQ ID NO: 2338 - protein, 7 aa, Artificial Sequence
  Description of Artificial Sequence: Synthetic peptide
QQQQNNQ

SEQ ID NO: 2339 - protein, 7 aa, Artificial Sequence
  Description of Artificial Sequence: Synthetic peptide
QQQQNQN

SEQ ID NO: 2340 - protein, 7 aa, Artificial Sequence
  Description of Artificial Sequence: Synthetic peptide
QQQQQQN

SEQ ID NO: 2341 - protein, 7 aa, Artificial Sequence
  Description of Artificial Sequence: Synthetic peptide
NQQQQQQ

SEQ ID NO: 2342 - protein, 7 aa, Artificial Sequence
  Description of Artificial Sequence: Synthetic peptide
QNQQQQQ

SEQ ID NO: 2343 - protein, 7 aa, Artificial Sequence
  Description of Artificial Sequence: Synthetic peptide
QQNQQQQ

SEQ ID NO: 2344 - protein, 7 aa, Artificial Sequence
  Description of Artificial Sequence: Synthetic peptide
QQQNQQQ

SEQ ID NO: 2345 - protein, 7 aa, Artificial Sequence
  Description of Artificial Sequence: Synthetic peptide
QQQQNQQ

SEQ ID NO: 2346 - protein, 7 aa, Artificial Sequence
  Description of Artificial Sequence: Synthetic peptide
QQQQQNQ

SEQ ID NO: 2347 - protein, 4 aa, Artificial Sequence
  Description of Artificial Sequence: Synthetic peptide
QQQD

SEQ ID NO: 2348 - protein, 4 aa, Artificial Sequence
  Description of Artificial Sequence: Synthetic peptide
DQQQ

SEQ ID NO: 2349 - protein, 4 aa, Artificial Sequence
  Description of Artificial Sequence: Synthetic peptide
QDQQ

SEQ ID NO: 2350 - protein, 4 aa, Artificial Sequence
  Description of Artificial Sequence: Synthetic peptide
QQDQ

SEQ ID NO: 2351 - protein, 5 aa, Artificial Sequence
  Description of Artificial Sequence: Synthetic peptide
QQQQD

SEQ ID NO: 2352 - protein, 5 aa, Artificial Sequence
  Description of Artificial Sequence: Synthetic peptide
DQQQQ

SEQ ID NO: 2353 - protein, 5 aa, Artificial Sequence
  Description of Artificial Sequence: Synthetic peptide
QDQQQ

SEQ ID NO: 2354 - protein, 5 aa, Artificial Sequence
  Description of Artificial Sequence: Synthetic peptide
QQDQQ

SEQ ID NO: 2355 - protein, 5 aa, Artificial Sequence
  Description of Artificial Sequence: Synthetic peptide
QQQDQ

SEQ ID NO: 2356 - protein, 5 aa, Artificial Sequence
  Description of Artificial Sequence: Synthetic peptide
QQQDD

SEQ ID NO: 2357 - protein, 5 aa, Artificial Sequence
  Description of Artificial Sequence: Synthetic peptide
DDQQQ

SEQ ID NO: 2358 - protein, 5 aa, Artificial Sequence
  Description of Artificial Sequence: Synthetic peptide
DQDQQ

SEQ ID NO: 2359 - protein, 5 aa, Artificial Sequence
  Description of Artificial Sequence: Synthetic peptide
DQQDQ

SEQ ID NO: 2360 - protein, 5 aa, Artificial Sequence
  Description of Artificial Sequence: Synthetic peptide
DQQQD

SEQ ID NO: 2361 - protein, 5 aa, Artificial Sequence
  Description of Artificial Sequence: Synthetic peptide
QDDQQ

SEQ ID NO: 2362 - protein, 5 aa, Artificial Sequence
  Description of Artificial Sequence: Synthetic peptide
QDQDQ

SEQ ID NO: 2363 - protein, 5 aa, Artificial Sequence
  Description of Artificial Sequence: Synthetic peptide
QDQQD

SEQ ID NO: 2364 - protein, 5 aa, Artificial Sequence
  Description of Artificial Sequence: Synthetic peptide
QQDDQ

SEQ ID NO: 2365 - protein, 5 aa, Artificial Sequence
  Description of Artificial Sequence: Synthetic peptide
QQDQD

SEQ ID NO: 2366 - protein, 6 aa, Artificial Sequence
  Description of Artificial Sequence: Synthetic peptide
QQQQQD

SEQ ID NO: 2367 - protein, 6 aa, Artificial Sequence
  Description of Artificial Sequence: Synthetic peptide
DQQQQQ

SEQ ID NO: 2368 - protein, 6 aa, Artificial Sequence
  Description of Artificial Sequence: Synthetic peptide
QDQQQQ

SEQ ID NO: 2369 - protein, 6 aa, Artificial Sequence
  Description of Artificial Sequence: Synthetic peptide
QQDQQQ

SEQ ID NO: 2370 - protein, 6 aa, Artificial Sequence
  Description of Artificial Sequence: Synthetic peptide
QQQDQQ

SEQ ID NO: 2371 - protein, 6 aa, Artificial Sequence
  Description of Artificial Sequence: Synthetic peptide
QQQQDQ

SEQ ID NO: 2372 - protein, 6 aa, Artificial Sequence
  Description of Artificial Sequence: Synthetic peptide
QQQQDD

SEQ ID NO: 2373 - protein, 6 aa, Artificial Sequence
  Description of Artificial Sequence: Synthetic peptide
DDQQQQ

SEQ ID NO: 2374 - protein, 6 aa, Artificial Sequence
  Description of Artificial Sequence: Synthetic peptide
DQDQQQ

SEQ ID NO: 2375 - protein, 6 aa, Artificial Sequence
  Description of Artificial Sequence: Synthetic peptide
DQQDQQ

SEQ ID NO: 2376 - protein, 6 aa, Artificial Sequence
  Description of Artificial Sequence: Synthetic peptide
DQQQDQ

SEQ ID NO: 2377 - protein, 6 aa, Artificial Sequence
  Description of Artificial Sequence: Synthetic peptide
DQQQQD

SEQ ID NO: 2378 - protein, 6 aa, Artificial Sequence
  Description of Artificial Sequence: Synthetic peptide
QDDQQQ

SEQ ID NO: 2379 - protein, 6 aa, Artificial Sequence
  Description of Artificial Sequence: Synthetic peptide
QDQDQQ

SEQ ID NO: 2380 - protein, 6 aa, Artificial Sequence
  Description of Artificial Sequence: Synthetic peptide
QDQQDQ

SEQ ID NO: 2381 - protein, 6 aa, Artificial Sequence
  Description of Artificial Sequence: Synthetic peptide
QDQQQD

SEQ ID NO: 2382 - protein, 6 aa, Artificial Sequence
  Description of Artificial Sequence: Synthetic peptide
QQDDQQ

SEQ ID NO: 2383 - protein, 6 aa, Artificial Sequence
  Description of Artificial Sequence: Synthetic peptide
QQDQDQ

SEQ ID NO: 2384 - protein, 6 aa, Artificial Sequence
  Description of Artificial Sequence: Synthetic peptide
QQDQQD

SEQ ID NO: 2385 - protein, 6 aa, Artificial Sequence
  Description of Artificial Sequence: Synthetic peptide
QQQDDQ

SEQ ID NO: 2386 - protein, 6 aa, Artificial Sequence
  Description of Artificial Sequence: Synthetic peptide
QQQDQD

SEQ ID NO: 2387 - protein, 7 aa, Artificial Sequence
  Description of Artificial Sequence: Synthetic peptide
QQQQDDD

SEQ ID NO: 2388 - protein, 7 aa, Artificial Sequence
  Description of Artificial Sequence: Synthetic peptide
DDDQQQQ

SEQ ID NO: 2389 - protein, 7 aa, Artificial Sequence
  Description of Artificial Sequence: Synthetic peptide
DQDDQQQ

SEQ ID NO: 2390 - protein, 7 aa, Artificial Sequence
  Description of Artificial Sequence: Synthetic peptide
DQDQDQQ

SEQ ID NO: 2391 - protein, 7 aa, Artificial Sequence
  Description of Artificial Sequence: Synthetic peptide
DQDQQDQ

SEQ ID NO: 2392 - protein, 7 aa, Artificial Sequence
  Description of Artificial Sequence: Synthetic peptide
DQDQQQD

SEQ ID NO: 2393 - protein, 7 aa, Artificial Sequence
  Description of Artificial Sequence: Synthetic peptide
DQQDDQQ

SEQ ID NO: 2394 - protein, 7 aa, Artificial Sequence
  Description of Artificial Sequence: Synthetic peptide
DQQDQDQ

SEQ ID NO: 2395 - protein, 7 aa, Artificial Sequence
  Description of Artificial Sequence: Synthetic peptide
DQQDQQD

SEQ ID NO: 2396 - protein, 7 aa, Artificial Sequence
  Description of Artificial Sequence: Synthetic peptide
DQQQDQD

SEQ ID NO: 2397 - protein, 7 aa, Artificial Sequence
  Description of Artificial Sequence: Synthetic peptide
DQQQDDQ

SEQ ID NO: 2398 - protein, 7 aa, Artificial Sequence
  Description of Artificial Sequence: Synthetic peptide
DQQQQDD

SEQ ID NO: 2399 - protein, 7 aa, Artificial Sequence
  Description of Artificial Sequence: Synthetic peptide
DDQDQQQ

SEQ ID NO: 2400 - protein, 7 aa, Artificial Sequence
  Description of Artificial Sequence: Synthetic peptide
DDQQDQQ

SEQ ID NO: 2401 - protein, 7 aa, Artificial Sequence
  Description of Artificial Sequence: Synthetic peptide
DDQQQDQ

SEQ ID NO: 2402 - protein, 7 aa, Artificial Sequence
  Description of Artificial Sequence: Synthetic peptide
DDQQQQD

SEQ ID NO: 2403 - protein, 7 aa, Artificial Sequence
  Description of Artificial Sequence: Synthetic peptide
QDDDQQQ

SEQ ID NO: 2404 - protein, 7 aa, Artificial Sequence
  Description of Artificial Sequence: Synthetic peptide
QDDQDQQ

SEQ ID NO: 2405 - protein, 7 aa, Artificial Sequence
  Description of Artificial Sequence: Synthetic peptide
QDDQQDQ

SEQ ID NO: 2406 - protein, 7 aa, Artificial Sequence
  Description of Artificial Sequence: Synthetic peptide
QDDQQQD

SEQ ID NO: 2407 - protein, 7 aa, Artificial Sequence
  Description of Artificial Sequence: Synthetic peptide
QDQDDQQ

SEQ ID NO: 2408 - protein, 7 aa, Artificial Sequence
  Description of Artificial Sequence: Synthetic peptide
QDQQDDQ

SEQ ID NO: 2409 - protein, 7 aa, Artificial Sequence
  Description of Artificial Sequence: Synthetic peptide
QDQQQDD

SEQ ID NO: 2410 - protein, 7 aa, Artificial Sequence
  Description of Artificial Sequence: Synthetic peptide
QDQDQDQ

SEQ ID NO: 2411 - protein, 7 aa, Artificial Sequence
  Description of Artificial Sequence: Synthetic peptide
QDQDQQD

SEQ ID NO: 2412 - protein, 7 aa, Artificial Sequence
  Description of Artificial Sequence: Synthetic peptide
QDQQDQD

SEQ ID NO: 2413 - protein, 7 aa, Artificial Sequence
  Description of Artificial Sequence: Synthetic peptide
QQDDDQQ

SEQ ID NO: 2414 - protein, 7 aa, Artificial Sequence
  Description of Artificial Sequence: Synthetic peptide
QQDDQDQ

SEQ ID NO: 2415 - protein, 7 aa, Artificial Sequence
  Description of Artificial Sequence: Synthetic peptide
QQDDQQD

SEQ ID NO: 2416 - protein, 7 aa, Artificial Sequence
  Description of Artificial Sequence: Synthetic peptide
QQDQDDQ

SEQ ID NO: 2417 - protein, 7 aa, Artificial Sequence
  Description of Artificial Sequence: Synthetic peptide
QQDQDQD

SEQ ID NO: 2418 - protein, 7 aa, Artificial Sequence
  Description of Artificial Sequence: Synthetic peptide
QQDQQDD

SEQ ID NO: 2419 - protein, 7 aa, Artificial Sequence
  Description of Artificial Sequence: Synthetic peptide
QQQDDDQ

SEQ ID NO: 2420 - protein, 7 aa, Artificial Sequence
  Description of Artificial Sequence: Synthetic peptide
QQQDDQD

SEQ ID NO: 2421 - protein, 7 aa, Artificial Sequence
  Description of Artificial Sequence: Synthetic peptide
QQQDQDD

SEQ ID NO: 2422 - protein, 7 aa, Artificial Sequence
  Description of Artificial Sequence: Synthetic peptide
QQQQQDD

SEQ ID NO: 2423 - protein, 7 aa, Artificial Sequence
  Description of Artificial Sequence: Synthetic peptide
DDQQQQQ

SEQ ID NO: 2424 - protein, 7 aa, Artificial Sequence
  Description of Artificial Sequence: Synthetic peptide
DQDQQQQ

SEQ ID NO: 2425 - protein, 7 aa, Artificial Sequence
  Description of Artificial Sequence: Synthetic peptide
DQQDQQQ

SEQ ID NO: 2426 - protein, 7 aa, Artificial Sequence
  Description of Artificial Sequence: Synthetic peptide
DQQQDQQ

SEQ ID NO: 2427 - protein, 7 aa, Artificial Sequence
  Description of Artificial Sequence: Synthetic peptide
DQQQQDQ

SEQ ID NO: 2428 - protein, 7 aa, Artificial Sequence
  Description of Artificial Sequence: Synthetic peptide
DQQQQQD

SEQ ID NO: 2429 - protein, 7 aa, Artificial Sequence
  Description of Artificial Sequence: Synthetic peptide
QDDQQQQ

SEQ ID NO: 2430 - protein, 7 aa, Artificial Sequence
  Description of Artificial Sequence: Synthetic peptide
QDQDQQQ

SEQ ID NO: 2431 - protein, 7 aa, Artificial Sequence
  Description of Artificial Sequence: Synthetic peptide
QDQQDQQ

SEQ ID NO: 2432 - protein, 7 aa, Artificial Sequence
  Description of Artificial Sequence: Synthetic peptide
QDQQQDQ

SEQ ID NO: 2433 - protein, 7 aa, Artificial Sequence
  Description of Artificial Sequence: Synthetic peptide
QDQQQQD

SEQ ID NO: 2434 - protein, 7 aa, Artificial Sequence
  Description of Artificial Sequence: Synthetic peptide
QQDDQQQ

SEQ ID NO: 2435 - protein, 7 aa, Artificial Sequence
  Description of Artificial Sequence: Synthetic peptide
QQDQDQQ

SEQ ID NO: 2436 - protein, 7 aa, Artificial Sequence
  Description of Artificial Sequence: Synthetic peptide
QQDQQDQ

SEQ ID NO: 2437 - protein, 7 aa, Artificial Sequence
  Description of Artificial Sequence: Synthetic peptide
QQDQQQD

SEQ ID NO: 2438 - protein, 7 aa, Artificial Sequence
  Description of Artificial Sequence: Synthetic peptide
QQQDDQQ

SEQ ID NO: 2439 - protein, 7 aa, Artificial Sequence
  Description of Artificial Sequence: Synthetic peptide
QQQDQDQ

SEQ ID NO: 2440 - protein, 7 aa, Artificial Sequence
  Description of Artificial Sequence: Synthetic peptide
QQQDQQD

SEQ ID NO: 2441 - protein, 7 aa, Artificial Sequence
  Description of Artificial Sequence: Synthetic peptide
QQQQDDQ

SEQ ID NO: 2442 - protein, 7 aa, Artificial Sequence
  Description of Artificial Sequence: Synthetic peptide
QQQQDQD

SEQ ID NO: 2443 - protein, 7 aa, Artificial Sequence
  Description of Artificial Sequence: Synthetic peptide
QQQQQQD

SEQ ID NO: 2444 - protein, 7 aa, Artificial Sequence
  Description of Artificial Sequence: Synthetic peptide
DQQQQQQ

SEQ ID NO: 2445 - protein, 7 aa, Artificial Sequence
  Description of Artificial Sequence: Synthetic peptide
QDQQQQQ

SEQ ID NO: 2446 - protein, 7 aa, Artificial Sequence
  Description of Artificial Sequence: Synthetic peptide
QQDQQQQ

SEQ ID NO: 2447 - protein, 7 aa, Artificial Sequence
  Description of Artificial Sequence: Synthetic peptide
QQQDQQQ

SEQ ID NO: 2448 - protein, 7 aa, Artificial Sequence
  Description of Artificial Sequence: Synthetic peptide
QQQQDQQ

SEQ ID NO: 2449 - protein, 7 aa, Artificial Sequence
  Description of Artificial Sequence: Synthetic peptide
QQQQQDQ

SEQ ID NO: 2450 - protein, 347 aa, Artificial Sequence
  Description of Artificial Sequence: Synthetic amino acid sequence
MFLQNLFLGFLAVVCANATPLGPASSLPQSFLLKCLEQVRKIQGDGAALQEKLCATYKLCHPEELVLLGHSLGIPWAPLSSCPSQALQLAGCLSQLHSGLFLYQGLLQALEGISPELGPTLDTLQLDVADFATTIWQQMEELGMAPALQPTQGAMPAFASAFQRRAGGVLVASHLQSFLEVSYRVLRHLAQPNNTNNTNNTNNTNNTNNTNNTNNTNNTNNTNNTNNTNNTNNTNNTNNTNNTNNTNNTNNTNNTNNTNNTNNTNNTNNTNNTNNTNNTNNTNNTNNTNNTNNTNNTNNTNNTNNTNNTNNTNNTNNTNNTNNTNNTNNTNNTNNTNNTNNTNNTNN

SEQ ID NO: 2451 - DNA, 1044 bp, Artificial Sequence
  Description of Artificial Sequence: Synthetic nucleotide sequence
atgttcttgcaaaatttattccttggctttttggccgttgtttgcgcaaacgcgactccgctgggtccagctagctccctgccccagagcttcctgctcaagtgcttagagcaagtgaggaagatccagggcgatggcgcagcgctccaggagaagctgtgtgccacctacaagctgtgccaccccgaggagctggtgctgctcggacactctctgggcatcccctgggctcccctgagcagctgccccagccaggccctgcagctggcaggctgcttgagccaactccatagcggccttttcctctaccaggggctcctgcaggccctggaagggatctcccccgagttgggtcccaccttggacacactgcagctggacgtcgccgactttgccaccaccatctggcagcagatggaagaactgggaatggcccctgccctgcagccgacccagggtgccatgccggccttcgcctctgctttccagcgccgggcaggaggggtcctagttgcctcccatctgcagagcttcctggaggtgtcgtaccgcgttctacgccaccttgcccagcctaacaacaccaacaataccaacaatacaaacaacaccaacaataccaacaatacaaacaacaccaacaataccaacaatacaaacaacaccaacaataccaacaatacaaacaacaccaacaataccaacaatacaaacaacaccaacaataccaacaatacaaacaacaccaacaataccaacaatacaaacaacaccaataataccaacaatacaaacaacaccaataataccaacaatacaaacaacaccaataataccaacaatacaaacaacaccaataataccaacaatacaaacaacaccaataataccaacaatacaaacaacaccaataataccaacaatacaaacaacaccaataataccaacaatacaaacaacaccaataataccaacaatacaaacaacaccaataataccaacaatacaaacaacaccaataataccaacaatacaaacaactag

SEQ ID NO: 2452 - protein, 193 aa, Homo sapiens
MGVHECPAWLWLLLSLLSLPLGLPVLGAPPRLICDSRVLERYLLEAKEAENITTGCAEHCSLNENITVPDTKVNFYAWKRMEVGQQAVEVWQGLALLSEAVLRGQALLVNSSQPWEPLQLHVDKAVSGLRSLTTLLRALGAQKEAISPPDAASAAPLRTITADTFRKLFRVYSNFLRGKLKLYTGEACRTGDR

SEQ ID NO: 2453 - DNA, 1340 bp, Homo sapiens
cccggagccggaccggggccaccgcgcccgctctgctccgacaccgcgccccctggacagccgccctctcctccaggcccgtggggctggccctgcaccgccgagcttcccgggatgagggcccccggtgtggtcacccggcgcgccccaggtcgctgagggaccccggccaggcgcggagatgggggtgcacgaatgtcctgcctggctgtggcttctcctgtccctgctgtcgctccctctgggcctcccagtcctgggcgccccaccacgcctcatctgtgacagccgagtcctggagaggtacctcttggaggccaaggaggccgagaatatcacgacgggctgtgctgaacactgcagcttgaatgagaatatcactgtcccagacaccaaagttaatttctatgcctggaagaggatggaggtcgggcagcaggccgtagaagtctggcagggcctggccctgctgtcggaagctgtcctgcggggccaggccctgttggtcaactcttcccagccgtgggagcccctgcagctgcatgtggataaagccgtcagtggccttcgcagcctcaccactctgcttcgggctctgggagcccagaaggaagccatctcccctccagatgcggcctcagctgctccactccgaacaatcactgctgacactttccgcaaactcttccgagtctactccaatttcctccggggaaagctgaagctgtacacaggggaggcctgcaggacaggggacagatgaccaggtgtgtccacctgggcatatccaccacctccctcaccaacattgcttgtgccacaccctcccccgccactcctgaaccccgtcgaggggctctcagctcagcgccagcctgtcccatggacactccagtgccagcaatgacatctcaggggccagaggaactgtccagagagcaactctgagatctaaggatgtcacagggccaacttgagggcccagagcaggaagcattcagagagcagctttaaactcagggacagagccatgctgggaagacgcctgagctcactcggcaccctgcaaaatttgatgccaggacacgctttggaggcgatttacctgttttcgcacctaccatcagggacaggatgacctggagaacttaggtggcaagctgtgacttctccaggtctcacgggcatgggcactcccttggtggcaagagcccccttgacaccggggtggtgggaaccatgaagacaggatgggggctggcctctggctctcatggggtccaagttttgtgtattcttcaacctcattgacaagaactgaaaccaccaaaaaaaaaaaa

SEQ ID NO: 2454 - protein, 554 aa, Homo sapiens
MTAPGAAGRCPPTTWLGSLLLLVCLLASRSITEEVSEYCSHMIGSGHLQSLQRLIDSQMETSCQITFEFVDQEQLKDPVCYLKKAFLLVQDIMEDTMRFRDNTPNAIAIVQLQELSLRLKSCFTKDYEEHDKACVRTFYETPLQLLEKVKNVFNETKNLLDKDWNIFSKNCNNSFAECSSQDVVTKPDCNCLYPKAIPSSDPASVSPHQPLAPSMAPVAGLTWEDSEGTEGSSLLPGEQPLHTVDPGSAKQRPPRSTCQSFEPPETPVVKDSTIGGSPQPRPSVGAFNPGMEDILDSAMGTNWVPEEASGEASEIPVPQGTELSPSRPGGGSMQTEPARPSNFLSASSPLPASAKGQQPADVTGTALPRVGPVRPTGQDWNHTPQKTDHPSALLRDPPEPGSPRISSLRPQGLSNPSTLSAQPQLSRSHSSGSVLPLGELEGRRSTRDRRSPAEPEGGPASEGAARPLPRFNSVPLTDTGHERQSEGSSSPQLQESVFHLLVPSVILVLLAVGGLLFYRWRRRSHQEPQRADSPLEQPEGSPLTQDDRQVELPV

SEQ ID NO: 2455 - DNA, 2545 bp, Homo sapiens
gagggctggccagtgaggctcggcccggggaaagtgaaagtttgcctgggtcctctcggcgccagagccgctctccgcatcccaggacagcggtgcggccctcggccggggcgcccactccgcagcagccagcgagcgagcgagcgagcgagggcggccgacgcgcccggccgggacccagctgcccgtatgaccgcgccgggcgccgccgggcgctgccctcccacgacatggctgggctccctgctgttgttggtctgtctcctggcgagcaggagtatcaccgaggaggtgtcggagtactgtagccacatgattgggagtggacacctgcagtctctgcagcggctgattgacagtcagatggagacctcgtgccaaattacatttgagtttgtagaccaggaacagttgaaagatccagtgtgctaccttaagaaggcatttctcctggtacaagacataatggaggacaccatgcgcttcagagataacacccccaatgccatcgccattgtgcagctgcaggaactctctttgaggctgaagagctgcttcaccaaggattatgaagagcatgacaaggcctgcgtccgaactttctatgagacacctctccagttgctggagaaggtcaagaatgtctttaatgaaacaaagaatctccttgacaaggactggaatattttcagcaagaactgcaacaacagctttgctgaatgctccagccaagatgtggtgaccaagcctgattgcaactgcctgtaccccaaagccatccctagcagtgacccggcctctgtctcccctcatcagcccctcgccccctccatggcccctgtggctggcttgacctgggaggactctgagggaactgagggcagctccctcttgcctggtgagcagcccctgcacacagtggatccaggcagtgccaagcagcggccacccaggagcacctgccagagctttgagccgccagagaccccagttgtcaaggacagcaccatcggtggctcaccacagcctcgcccctctgtcggggccttcaaccccgggatggaggatattcttgactctgcaatgggcactaattgggtcccagaagaagcctctggagaggccagtgagattcccgtaccccaagggacagagctttccccctccaggccaggagggggcagcatgcagacagagcccgccagacccagcaacttcctctcagcatcttctccactccctgcatcagcaaagggccaacagccggcagatgtaactggtacagccttgcccagggtgggccccgtgaggcccactggccaggactggaatcacaccccccagaagacagaccatccatctgccctgctcagagaccccccggagccaggctctcccaggatctcatcactgcgcccccagggcctcagcaacccctccaccctctctgctcagccacagctttccagaagccactcctcgggcagcgtgctgccccttggggagctggagggcaggaggagcaccagggatcggaggagccccgcagagccagaaggaggaccagcaagtgaaggggcagccaggcccctgccccgttttaactccgttcctttgactgacacaggccatgagaggcagtccgagggatcctccagcccgcagctccaggagtctgtcttccacctgctggtgcccagtgtcatcctggtcttgctggccgtcggaggcctcttgttctacaggtggaggcggcggagccatcaagagcctcagagagcggattctcccttggagcaaccagagggcagccccctgactcaggatgacagacaggtggaactgccagtgtagagggaattctaagacccctcaccatcctggacacactcgtttgtcaatgtccctctgaaaatgtgacgcccagccccggacacagtactccagatgttgtctgaccagctcagagagagtacagtgggactgttaccttccttgatatggacagtattcttctatttgtgcagattaagattgcattagtttttttcttaacaactgcatcatactgttgtcatatgttgagcctgtggttctataaaacccctagttccatttcccataaacttctgtcaagccagaccatctctaccctgtacttggacaacttaacttttttaaccaaagtgcagtttatgttcacctttgttaaagccacctttgtggtttctgcccatcacctgaacctactgaagttgtgtgaaatcctaattctgtcatctccgtagccctcccagttgtgcctcctgcacattgatgagtgcctgctgttgtctttgcccatgttgttgatgtagctgtgaccctattgttcctcacccctgccccccgccaaccccagctggcccacctcttccccctcccacccaagcccacagccagcccatcaggaagccttcctggcttctccacaaccttctgactgtcttttcagtcatgccccctgctcttttgtatttggctaatagtatatcaatttgcactt

SEQ ID NO: 2456 - protein, 256 aa, Homo sapiens
MTAPGAAGRCPPTTWLGSLLLLVCLLASRSITEEVSEYCSHMIGSGHLQSLQRLIDSQMETSCQITFEFVDQEQLKDPVCYLKKAFLLVQDIMEDTMRFRDNTPNAIAIVQLQELSLRLKSCFTKDYEEHDKACVRTFYETPLQLLEKVKNVFNETKNLLDKDWNIFSKNCNNSFAECSSQGHERQSEGSSSPQLQESVFHLLVPSVILVLLAVGGLLFYRWRRRSHQEPQRADSPLEQPEGSPLTQDDRQVELPV

SEQ ID NO: 2457 - DNA, 1855 bp, Homo sapiens
gagggctggccagtgaggctcggcccggggaaagtgaaagtttgcctgggtcctctcggcgccagagccgctctccgcatcccaggacagcggtgcggccctcggccggggcgcccactccgcagcagccagcgagcgagcgagcgagcgagggcggccgacgcgcccggccgggacccagctgcccgtatgaccgcgccgggcgccgccgggcgctgccctcccacgacatggctgggctccctgctgttgttggtctgtctcctggcgagcaggagtatcaccgaggaggtgtcggagtactgtagccacatgattgggagtggacacctgcagtctctgcagcggctgattgacagtcagatggagacctcgtgccaaattacatttgagtttgtagaccaggaacagttgaaagatccagtgtgctaccttaagaaggcatttctcctggtacaagacataatggaggacaccatgcgcttcagagataacacccccaatgccatcgccattgtgcagctgcaggaactctctttgaggctgaagagctgcttcaccaaggattatgaagagcatgacaaggcctgcgtccgaactttctatgagacacctctccagttgctggagaaggtcaagaatgtctttaatgaaacaaagaatctccttgacaaggactggaatattttcagcaagaactgcaacaacagctttgctgaatgctccagccaaggccatgagaggcagtccgagggatcctccagcccgcagctccaggagtctgtcttccacctgctggtgcccagtgtcatcctggtcttgctggccgtcggaggcctcttgttctacaggtggaggcggcggagccatcaagagcctcagagagcggattctcccttggagcaaccagagggcagccccctgactcaggatgacagacaggtggaactgccagtgtagagggaattctaagctggacgcacagaacagtctctccgtgggaggagacattatggggcgtccaccaccacccctccctggccatcctcctggaatgtggtctgccctccaccagagctcctgcctgccaggactggaccagagcagccaggctggggcccctctgtctcaacccgcagacccttgactgaatgagagaggccagaggatgctccccatgctgccactatttattgtgagccctggaggctcccatgtgcttgaggaaggctggtgagcccggctcaggaccctcttccctcaggggctgcaccctcctctcactcccttccatgccggaacccaggccagggacccaccggcctgtggtttgtgggaaagcagggtggacgctgaggagtgaaagaaccctgcacccagagggcctgcctggtgccaaggtatcccagcctggacaggcatggacctgtctccagagagaggagcctgaagttcgtggggcgggacagcgtcggcctgatttcccgtaaaggtgtgcagcctgagagacgggaagaggaggcctctggacctgctggtctgcactgacagcctgaagggtctacaccctcggctcacctaagtgccctgtgctggttgccaggcgcagaggggaggccagccctgccctcaggacctgcctgacctgccagtgatgccaagagggggatcaagcactggcctctgcccctcctccttccagcacctgccagagcttctccaggaggccaagcagaggctcccctcatgaaggaagccattgcactgtgaacactgtacctgcctgctgaacagcctgcccccgtccatccatgagccagcatccgtccgtcctccactctccagcctctcccca

SEQ ID NO: 2458 - protein, 438 aa, Homo sapiens
MTAPGAAGRCPPTTWLGSLLLLVCLLASRSITEEVSEYCSHMIGSGHLQSLQRLIDSQMETSCQITFEFVDQEQLKDPVCYLKKAFLLVQDIMEDTMRFRDNTPNAIAIVQLQELSLRLKSCFTKDYEEHDKACVRTFYETPLQLLEKVKNVFNETKNLLDKDWNIFSKNCNNSFAECSSQDVVTKPDCNCLYPKAIPSSDPASVSPHQPLAPSMAPVAGLTWEDSEGTEGSSLLPGEQPLHTVDPGSAKQRPPRSTCQSFEPPETPVVKDSTIGGSPQPRPSVGAFNPGMEDILDSAMGTNWVPEEASGEASEIPVPQGTELSPSRPGGGSMQTEPARPSNFLSASSPLPASAKGQQPADVTGHERQSEGSSSPQLQESVFHLLVPSVILVLLAVGGLLFYRWRRRSHQEPQRADSPLEQPEGSPLTQDDRQVELPV

SEQ ID NO: 2459 - DNA, 1519 bp, Homo sapiens
gagggctggccagtgaggctcggcccggggaaagtgaaagtttgcctgggtcctctcggcgccagagccgctctccgcatcccaggacagcggtgcggccctcggccggggcgcccactccgcagcagccagcgagcgagcgagcgagcgagggcggccgacgcgcccggccgggacccagctgcccgtatgaccgcgccgggcgccgccgggcgctgccctcccacgacatggctgggctccctgctgttgttggtctgtctcctggcgagcaggagtatcaccgaggaggtgtcggagtactgtagccacatgattgggagtggacacctgcagtctctgcagcggctgattgacagtcagatggagacctcgtgccaaattacatttgagtttgtagaccaggaacagttgaaagatccagtgtgctaccttaagaaggcatttctcctggtacaagacataatggaggacaccatgcgcttcagagataacacccccaatgccatcgccattgtgcagctgcaggaactctctttgaggctgaagagctgcttcaccaaggattatgaagagcatgacaaggcctgcgtccgaactttctatgagacacctctccagttgctggagaaggtcaagaatgtctttaatgaaacaaagaatctccttgacaaggactggaatattttcagcaagaactgcaacaacagctttgctgaatgctccagccaagatgtggtgaccaagcctgattgcaactgcctgtaccccaaagccatccctagcagtgacccggcctctgtctcccctcatcagcccctcgccccctccatggcccctgtggctggcttgacctgggaggactctgagggaactgagggcagctccctcttgcctggtgagcagcccctgcacacagtggatccaggcagtgccaagcagcggccacccaggagcacctgccagagctttgagccgccagagaccccagttgtcaaggacagcaccatcggtggctcaccacagcctcgcccctctgtcggggccttcaaccccgggatggaggatattcttgactctgcaatgggcactaattgggtcccagaagaagcctctggagaggccagtgagattcccgtaccccaagggacagagctttccccctccaggccaggagggggcagcatgcagacagagcccgccagacccagcaacttcctctcagcatcttctccactccctgcatcagcaaagggccaacagccggcagatgtaactggccatgagaggcagtccgagggatcctccagcccgcagctccaggagtctgtcttccacctgctggtgcccagtgtcatcctggtcttgctggccgtcggaggcctcttgttctacaggtggaggcggcggagccatcaagagcctcagagagcggattctcccttggagcaaccagagggcagccccctgactcaggatgacagacaggtggaactgccagtgtagagggaattctaag

SEQ ID NO: 2460 - protein, 554 aa, Homo sapiens; identical to SEQ ID NO: 2454

SEQ ID NO: 2461 - DNA, 2749 bp, Homo sapiens
gagggctggccagtgaggctcggcccggggaaagtgaaagtttgcctgggtcctctcggcgccagagccgctctccgcatcccaggacagcggtgcggccctcggccggggcgcccactccgcagcagccagcgagcgagcgagcgagcgagggcggccgacgcgcccggccgggacccagctgcccgtatgaccgcgccgggcgccgccgggcgctgccctcccacgacatggctgggctccctgctgttgttggtctgtctcctggcgagcaggagtatcaccgaggaggtgtcggagtactgtagccacatgattgggagtggacacctgcagtctctgcagcggctgattgacagtcagatggagacctcgtgccaaattacatttgagtttgtagaccaggaacagttgaaagatccagtgtgctaccttaagaaggcatttctcctggtacaagacataatggaggacaccatgcgcttcagagataacacccccaatgccatcgccattgtgcagctgcaggaactctctttgaggctgaagagctgcttcaccaaggattatgaagagcatgacaaggcctgcgtccgaactttctatgagacacctctccagttgctggagaaggtcaagaatgtctttaatgaaacaaagaatctccttgacaaggactggaatattttcagcaagaactgcaacaacagctttgctgaatgctccagccaagatgtggtgaccaagcctgattgcaactgcctgtaccccaaagccatccctagcagtgacccggcctctgtctcccctcatcagcccctcgccccctccatggcccctgtggctggcttgacctgggaggactctgagggaactgagggcagctccctcttgcctggtgagcagcccctgcacacagtggatccaggcagtgccaagcagcggccacccaggagcacctgccagagctttgagccgccagagaccccagttgtcaaggacagcaccatcggtggctcaccacagcctcgcccctctgtcggggccttcaaccccgggatggaggatattcttgactctgcaatgggcactaattgggtcccagaagaagcctctggagaggccagtgagattcccgtaccccaagggacagagctttccccctccaggccaggagggggcagcatgcagacagagcccgccagacccagcaacttcctctcagcatcttctccactccctgcatcagcaaagggccaacagccggcagatgtaactggtacagccttgcccagggtgggccccgtgaggcccactggccaggactggaatcacaccccccagaagacagaccatccatctgccctgctcagagaccccccggagccaggctctcccaggatctcatcactgcgcccccagggcctcagcaacccctccaccctctctgctcagccacagctttccagaagccactcctcgggcagcgtgctgccccttggggagctggagggcaggaggagcaccagggatcggaggagccccgcagagccagaaggaggaccagcaagtgaaggggcagccaggcccctgccccgttttaactccgttcctttgactgacacaggccatgagaggcagtccgagggatcctccagcccgcagctccaggagtctgtcttccacctgctggtgcccagtgtcatcctggtcttgctggccgtcggaggcctcttgttctacaggtggaggcggcggagccatcaagagcctcagagagcggattctcccttggagcaaccagagggcagccccctgactcaggatgacagacaggtggaactgccagtgtagagggaattctaagctggacgcacagaacagtctctccgtgggaggagacattatggggcgtccaccaccacccctccctggccatcctcctggaatgtggtctgccctccaccagagctcctgcctgccaggactggaccagagcagccaggctggggcccctctgtctcaacccgcagacccttgactgaatgagagaggccagaggatgctccccatgctgccactatttattgtgagccctggaggctcccatgtgcttgaggaaggctggtgagcccggctcaggaccctcttccctcaggggctgcaccctcctctcactcccttccatgccggaacccaggccagggacccaccggcctgtggtttgtgggaaagcagggtggacgctgaggagtgaaagaaccctgcacccagagggcctgcctggtgccaaggtatcccagcctggacaggcatggacctgtctccagagagaggagcctgaagttcgtggggcgggacagcgtcggcctgatttcccgtaaaggtgtgcagcctgagagacgggaagaggaggcctctggacctgctggtctgcactgacagcctgaagggtctacaccctcggctcacctaagtgccctgtgctggttgccaggcgcagaggggaggccagccctgccctcaggacctgcctgacctgccagtgatgccaagagggggatcaagcactggcctctgcccctcctccttccagcacctgccagagcttctccaggaggccaagcagaggctcccctcatgaaggaagccattgcactgtgaacactgtacctgcctgctgaacagcctgcccccgtccatccatgagccagcatccgtccgtcctccactctccagcctctcccca

SEQ ID NO: 2462 - protein, 144 aa, Homo sapiens
MWLQSLLLLGTVACSISAPARSPSPSTQPWEHVNAIQEARRLLNLSRDTAAEMNETVEVISEMFDLQEPTCLQTRLELYKQGLRGSLTKLKGPLTMMASHYKQHCPPTPETSCATQIITFESFKENLKDFLLVIPFDCWEPVQE

SEQ ID NO: 2463 - DNA, 781 bp, Homo sapiens
acacagagagaaaggctaaagttctctggaggatgtggctgcagagcctgctgctcttgggcactgtggcctgcagcatctctgcacccgcccgctcgcccagccccagcacgcagccctgggagcatgtgaatgccatccaggaggcccggcgtctcctgaacctgagtagagacactgctgctgagatgaatgaaacagtagaagtcatctcagaaatgtttgacctccaggagccgacctgcctacagacccgcctggagctgtacaagcagggcctgcggggcagcctcaccaagctcaagggccccttgaccatgatggccagccactacaagcagcactgccctccaaccccggaaacttcctgtgcaacccagattatcacctttgaaagtttcaaagagaacctgaaggactttctgcttgtcatcccctttgactgctgggagccagtccaggagtgagaccggccagatgaggctggccaagccggggagctgctctctcatgaaacaagagctagaaactcaggatggtcatcttggagggaccaaggggtgggccacagccatggtgggagtggcctggacctgccctgggccacactgaccctgatacaggcatggcagaagaatgggaatattttatactgacagaaatcagtaatatttatatatttatatttttaaaatatttatttatttatttatttaagttcatattccatatttattcaagatgttttaccgtaataattattattaaaaatatgcttcta

SEQ ID NO: 2464 - protein, 233 aa, Homo sapiens
MSTESMIRDVELAEEALPKKTGGPQGSRRCLFLSLFSFLIVAGATTLFCLLHFGVIGPQREEFPRDLSLISPLAQAVRSSSRTPSDKPVAHVVANPQAEGQLQWLNRRANALLANGVELRDNQLVVPSEGLYLIYSQVLFKGQGCPSTHVLLTHTISRIAVSYQTKVNLLSAIKSPCQRETPEGAEAKPWYEPIYLGGVFQLEKGDRLSAEINRPDYLDFAESGQVYFGIIAL

SEQ ID NO: 2465 - DNA, 1669 bp, Homo sapiens
ctccctcagcaaggacagcagaggaccagctaagagggagagaagcaactacagaccccccctgaaaacaaccctcagacgccacatcccctgacaagctgccaggcaggttctcttcctctcacatactgacccacggctccaccctctctcccctggaaaggacaccatgagcactgaaagcatgatccgggacgtggagctggccgaggaggcgctccccaagaagacaggggggccccagggctccaggcggtgcttgttcctcagcctcttctccttcctgatcgtggcaggcgccaccacgctcttctgcctgctgcactttggagtgatcggcccccagagggaagagttccccagggacctctctctaatcagccctctggcccaggcagtcagatcatcttctcgaaccccgagtgacaagcctgtagcccatgttgtagcaaaccctcaagctgaggggcagctccagtggctgaaccgccgggccaatgccctcctggccaatggcgtggagctgagagataaccagctggtggtgccatcagagggcctgtacctcatctactcccaggtcctcttcaagggccaaggctgcccctccacccatgtgctcctcacccacaccatcagccgcatcgccgtctcctaccagaccaaggtcaacctcctctctgccatcaagagcccctgccagagggagaccccagagggggctgaggccaagccctggtatgagcccatctatctgggaggggtcttccagctggagaagggtgaccgactcagcgctgagatcaatcggcccgactatctcgactttgccgagtctgggcaggtctactttgggatcattgccctgtgaggaggacgaacatccaaccttcccaaacgcctcccctgccccaatccctttattaccccctccttcagacaccctcaacctcttctggctcaaaaagagaattgggggcttagggtcggaacccaagcttagaactttaagcaacaagaccaccacttcgaaacctgggattcaggaatgtgtggcctgcacagtgaagtgctggcaaccactaagaattcaaactggggcctccagaactcactggggcctacagctttgatccctgacatctggaatctggagaccagggagcctttggttctggccagaatgctgcaggacttgagaagacctcacctagaaattgacacaagtggaccttaggccttcctctctccagatgtttccagacttccttgagacacggagcccagccctccccatggagccagctccctctatttatgtttgcacttgtgattatttattatttatttattatttatttatttacagatgaatgtatttatttgggagaccggggtatcctgggggacccaatgtaggagctgccttggctcagacatgttttccgtgaaaacggagctgaacaataggctgttcccatgtagccccctggcctctgtgccttcttttgattatgttttttaaaatatttatctgattaagttgtctaaacaatgctgatttggtgaccaactgtcactcattgctgagcctctgctccccaggggagttgtgtctgtaatcgccctactattcagtggcgagaaataaagtttgcttagaaaagaa

SEQ ID NO: 2466 - protein, 455 aa, Homo sapiens
MGLSTVPDLLLPLVLLELLVGIYPSGVIGLVPHLGDREKRDSVCPQGKYIHPQNNSICCTKCHKGTYLYNDCPGPGQDTDCRECESGSFTASENHLRHCLSCSKCRKEMGQVEISSCTVDRDTVCGCRKNQYRHYWSENLFQCFNCSLCLNGTVHLSCQEKQNTVCTCHAGFFLRENECVSCSNCKKSLECTKLCLPQIENVKGTEDSGTTVLLPLVIFFGLCLLSLLFIGLMYRYQRWKSKLYSIVCGKSTPEKEGELEGTTTKPLAPNPSFSPTPGFTPTLGFSPVPSSTFTSSSTYTPGDCPNFAAPRREVAPPYQGADPILATALASDPIPNPLQKWEDSAHKPQSLDTDDPATLYAVVENVPPLRWKEFVRRLGLSDHEIDRLELQNGRCLREAQYSMLATWRRRTPRREATLELLGRVLRDMDLLGCLEDIEEALCGPAALPPAPSLLR

SEQ ID NO: 2467 - DNA, 2236 bp, Homo sapiens
gctgttgcaacactgcctcactcttcccctcccaccttctctcccctcctctctgctttaattttctcagaattctctggactgaggctccagttctggcctttggggttcaagatcactgggaccaggccgtgatctctatgcccgagtctcaaccctcaactgtcaccccaaggcacttgggacgtcctggacagaccgagtcccgggaagccccagcactgccgctgccacactgccctgagcccaaatgggggagtgagaggccatagctgtctggcatgggcctctccaccgtgcctgacctgctgctgccactggtgctcctggagctgttggtgggaatatacccctcaggggttattggactggtccctcacctaggggacagggagaagagagatagtgtgtgtccccaaggaaaatatatccaccctcaaaataattcgatttgctgtaccaagtgccacaaaggaacctacttgtacaatgactgtccaggcccggggcaggatacggactgcagggagtgtgagagcggctccttcaccgcttcagaaaaccacctcagacactgcctcagctgctccaaatgccgaaaggaaatgggtcaggtggagatctcttcttgcacagtggaccgggacaccgtgtgtggctgcaggaagaaccagtaccggcattattggagtgaaaaccttttccagtgcttcaattgcagcctctgcctcaatgggaccgtgcacctctcctgccaggagaaacagaacaccgtgtgcacctgccatgcaggtttctttctaagagaaaacgagtgtgtctcctgtagtaactgtaagaaaagcctggagtgcacgaagttgtgcctaccccagattgagaatgttaagggcactgaggactcaggcaccacagtgctgttgcccctggtcattttctttggtctttgccttttatccctcctcttcattggtttaatgtatcgctaccaacggtggaagtccaagctctactccattgtttgtgggaaatcgacacctgaaaaagagggggagcttgaaggaactactactaagcccctggccccaaacccaagcttcagtcccactccaggcttcacccccaccctgggcttcagtcccgtgcccagttccaccttcacctccagctccacctatacccccggtgactgtcccaactttgcggctccccgcagagaggtggcaccaccctatcagggggctgaccccatccttgcgacagccctcgcctccgaccccatccccaacccccttcagaagtgggaggacagcgcccacaagccacagagcctagacactgatgaccccgcgacgctgtacgccgtggtggagaacgtgcccccgttgcgctggaaggaattcgtgcggcgcctagggctgagcgaccacgagatcgatcggctggagctgcagaacgggcgctgcctgcgcgaggcgcaatacagcatgctggcgacctggaggcggcgcacgccgcggcgcgaggccacgctggagctgctgggacgcgtgctccgcgacatggacctgctgggctgcctggaggacatcgaggaggcgctttgcggccccgccgccctcccgcccgcgcccagtcttctcagatgaggctgcgcccctgcgggcagctctaaggaccgtcctgcgagatcgccttccaaccccacttttttctggaaaggaggggtcctgcaggggcaagcaggagctagcagccgcctacttggtgctaacccctcgatgtacatagcttttctcagctgcctgcgcgccgccgacagtcagcgctgtgcgcgcggagagaggtgcgccgtgggctcaagagcctgagtgggtggtttgcgaggatgagggacgctatgcctcatgcccgttttgggtgtcctcaccagcaaggctgctcgggggcccctggttcgtccctgagcctttttcacagtgcataagcagttttttttgtttttgttttgttttgttttgtttttaaatcaatcatgttacactaatagaaacttggcactcctgtgccctctgcctggacaagcacatagcaagctgaactgtcctaaggcaggggcgagcacggaacaatggggccttcagctggagctgtggacttttgtacatacactaaaattctgaagttaaagctctgctcttggaaaaaaaaaaaaaaaaaaaaaaaaaaaaaaaaa

SEQ ID NO: 2468 - protein, 187 aa, Homo sapiens
MTNKCLLQIALLLCFSTTALSMSYNLLGFLQRSSNFQCQKLLWQLNGRLEYCLKDRMNFDIPEEIKQLQQFQKEDAALTIYEMLQNIFAIFRQDSSSTGWNETIVENLLANVYHQINHLKTVLEEKLEKEDFTRGKLMSSLHLKRYYGRILHYLKAKEYSHCAWTIVRVEILRNFYFINRLTGYLRN

SEQ ID NO: 2469 - DNA, 840 bp, Homo sapiens
acattctaactgcaacctttcgaagcctttgctctggcacaacaggtagtaggcgacactgttcgtgttgtcaacatgaccaacaagtgtctcctccaaattgctctcctgttgtgcttctccactacagctctttccatgagctacaacttgcttggattcctacaaagaagcagcaattttcagtgtcagaagctcctgtggcaattgaatgggaggcttgaatactgcctcaaggacaggatgaactttgacatccctgaggagattaagcagctgcagcagttccagaaggaggacgccgcattgaccatctatgagatgctccagaacatctttgctattttcagacaagattcatctagcactggctggaatgagactattgttgagaacctcctggctaatgtctatcatcagataaaccatctgaagacagtcctggaagaaaaactggagaaagaagatttcaccaggggaaaactcatgagcagtctgcacctgaaaagatattatgggaggattctgcattacctgaaggccaaggagtacagtcactgtgcctggaccatagtcagagtggaaatcctaaggaacttttacttcattaacagacttacaggttacctccgaaactgaagatctcctagcctgtgcctctgggactggacaattgcttcaagcattcttcaaccagcagatgctgtttaagtgactgatggctaatgtactgcatatgaaaggacactagaagattttgaaatttttattaaattatgagttatttttatttatttaaattttattttggaaaataaattatttttggtgcaaaagtca

SEQ ID NO: 2470 - protein, 166 aa, Homo sapiens
MKYTSYILAFQLCIVLGSLGCYCQDPYVKEAENLKKYFNAGHSDVADNGTLFLGILKNWKEESDRKIMQSQIVSFYFKLFKNFKDDQSIQKSVETIKEDMNVKFFNSNKKKRDDFEKLTNYSVTDLNVQRKAIHELIQVMAELSPAAKTGKRKRSQMLFRGRRASQ

SEQ ID NO: 2471 - DNA, 1240 bp, Homo sapiens
cacattgttctgatcatctgaagatcagctattagaagagaaagatcagttaagtcctttggacctgatcagcttgatacaagaactactgatttcaacttctttggcttaattctctcggaaacgatgaaatatacaagttatatcttggcttttcagctctgcatcgttttgggttctcttggctgttactgccaggacccatatgtaaaagaagcagaaaaccttaagaaatattttaatgcaggtcattcagatgtagcggataatggaactcttttcttaggcattttgaagaattggaaagaggagagtgacagaaaaataatgcagagccaaattgtctccttttacttcaaactttttaaaaactttaaagatgaccagagcatccaaaagagtgtggagaccatcaaggaagacatgaatgtcaagtttttcaatagcaacaaaaagaaacgagatgacttcgaaaagctgactaattattcggtaactgacttgaatgtccaacgcaaagcaatacatgaactcatccaagtgatggctgaactgtcgccagcagctaaaacagggaagcgaaaaaggagtcagatgctgtttcgaggtcgaagagcatcccagtaatggttgtcctgcctgcaatatttgaattttaaatctaaatctatttattaatatttaacattatttatatggggaatatatttttagactcatcaatcaaataagtatttataatagcaacttttgtgtaatgaaaatgaatatctattaatatatgtattatttataattcctatatcctgtgactgtctcacttaatcctttgttttctgactaattaggcaaggctatgtgattacaaggctttatctcaggggccaactaggcagccaacctaagcaagatcccatgggttgtgtgtttatttcacttgatgatacaatgaacacttataagtgaagtgatactatccagttactgccggtttgaaaatatgcctgcaatctgagccagtgctttaatggcatgtcagacagaacttgaatgtgtcaggtgaccctgatgaaaacatagcatctcaggagatttcatgcctggtgcttccaaatattgttgacaactgtgactgtacccaaatggaaagtaactcatttgttaaaattatcaatatctaatatatatgaataaagtgtaagttcacaacaaaaaaaaaaaaaaaaaaaaaaaaaaaaaa

SEQ ID NO: 2472 - protein, 202 aa, Homo sapiens
MATGSRTSLLLAFGLLCLPWLQEGSAFPTIPLSRLFDNASLRAHRLHQLAFDTYQEFNPQTSLCFSESIPTPSNREETQQKSNLELLRISLLLIQSWLEPVQFLRSVFANSLVYGASDSNVYDLLKDLEEGIQTLMGRLEDGSPRTGQIFKQTYSKFDTNSHNDDALLKNYGLLYCFRKDMDKVETFLRIVQCRSVEGSCGF

SEQ ID NO: 2473 - DNA, 1964 bp, Homo sapiens
agggcacccacgtgacccttaaagagaggacaagttgggtggtattttctggctgacactctgtgcacaaccctcacaacactggttgacggtgggaagggaaagatgacaagccaggggcatgatcccagcatgtgtgggaggagcttctaaattatccattagcacaagcccgtcagtggccccatgcataaatgtacacagaaacaggtgggggcaacagtgggagagaaggggccagggtataaaaagggcccacaagagaccggctcaaggatcccaaggcccaactccccgaaccactcagggtcctgtggacgctcacctagctgcaatggctacaggtaagcgcccctaaaatccctttgggcacaatgtgtcctgaggggagaggcagcgacctgtagatgggacgggggcactaaccctcaggtttggggcttctgaatgagtatcgccatgtaagcccagtatggccaatctcagaaagctcctggtccctggagggatggagagagaaaaacaaacagctcctggagcagggagagtgctggcctcttgctctccggctccctctgttgccctctggtttctccccaggctcccggacgtccctgctcctggcttttggcctgctctgcctgccctggcttcaagagggcagtgccttcccaaccattcccttatccaggctttttgacaacgctagtctccgcgcccatcgtctgcaccagctggcctttgacacctaccaggagtttgtaagctcttggggaatgggtgcgcatcaggggtggcaggaaggggtgactttcccccgctgggaaataagaggaggagactaaggagctcagggtttttcccgaagcgaaaatgcaggcagatgagcacacgctgagtgaggttcccagaaaagtaacaatgggagctggtctccagcgtagaccttggtgggcggtccttctcctaggaagaagcctatatcccaaaggaacagaagtattcattcctgcagaacccccagacctccctctgtttctcagagtctattccgacaccctccaacagggaggaaacacaacagaaatccgtgagtggatgccttgaccccaggcggggatgggggagacctgtagtcagagcccccgggcagcacaggccaatgcccgtccttcccctgcagaacctagagctgctccgcatctccctgctgctcatccagtcgtggctggagcccgtgcagttcctcaggagtgtcttcgccaacagcctggtgtacggcgcctctgacagcaacgtctatgacctcctaaaggacctagaggaaggcatccaaacgctgatgggggtgggggtggcgctaggggtccccaatcttggagccccactgactttgagagctgtgttagagaaacactgctgccctctttttagcagtccaggccctgacccaagagaactcaccttattcttcatttcccctcgtgaatcctctagcctttctctacaccctgaaggggagggaggaaaatgaatgaatgagaaagggagggagcagtacccaagcgcttggcctctccttctcttccttcactttgcagaggctggaagatggcagcccccggactgggcagatcttcaagcagacctacagcaagttcgacacaaactcacacaacgatgacgcactactcaagaactacgggctgctctactgcttcaggaaggacatggacaaggtcgagacattcctgcgcatcgtgcagtgccgctctgtggagggcagctgtggcttctagctgcccgggtggcatccctgtgacccctccccagtgcctctcctggccttggaagttgccactccagtgcccaccagccttgtcctaataaaattaagttgcatcattttgtctgactaggtgtcctctataatattatggggtggaggggggtggtttggagca

SEQ ID NO: 2474 - protein, 444 aa, Homo sapiens
MVSQALRLLCLLLGLQGCLAAVFVTQEEAHGVLHRRRRANAFLEELRPGSLERECKEEQCSFEEAREIFKDAERTKLFWISYSDGDQCASSPCQNGGSCKDQLQSYICFCLPAFEGRNCETHKDDQLICVNENGGCEQYCSDHTGTKRSCRCHEGYSLLADGVSCTPTVEYPCGKIPILEKRNASKPQGRIVGGKVCPKGECPWQVLLLVNGAQLCGGTLINTIWVVSAAHCFDKIKNWRNLIAVLGEHDLSEHDGDEQSRRVAQVIIPSTYVPGTTNHDIALLRLHQPVVLTDHVVPLCLPERTFSERTLAFVRFSLVSGWGQLLDRGATALELMVLNVPRLMTQDCLQQSRKVGDSPNITEYMFCAGYSDGSKDSCKGDSGGPHATHYRGTWYLTGIVSWGQGCATVGHFGVYTRVSQYIEWLQKLMRSEPRPGVLLRAPFP

SEQ ID NO: 2475 - DNA, 2412 bp, Homo sapiens
agtcccatggggaatgtcaacaggcaggggcagcactgcagagatttcatcatggtctcccaggccctcaggctcctctgccttctgcttgggcttcagggctgcctggctgcagtcttcgtaacccaggaggaagcccacggcgtcctgcaccggcgccggcgcgccaacgcgttcctggaggagctgcggccgggctccctggagagggagtgcaaggaggagcagtgctccttcgaggaggcccgggagatcttcaaggacgcggagaggacgaagctgttctggatttcttacagtgatggggaccagtgtgcctcaagtccatgccagaatgggggctcctgcaaggaccagctccagtcctatatctgcttctgcctccctgccttcgagggccggaactgtgagacgcacaaggatgaccagctgatctgtgtgaacgagaacggcggctgtgagcagtactgcagtgaccacacgggcaccaagcgctcctgtcggtgccacgaggggtactctctgctggcagacggggtgtcctgcacacccacagttgaatatccatgtggaaaaatacctattctagaaaaaagaaatgccagcaaaccccaaggccgaattgtggggggcaaggtgtgccccaaaggggagtgtccatggcaggtcctgttgttggtgaatggagctcagttgtgtggggggaccctgatcaacaccatctgggtggtctccgcggcccactgtttcgacaaaatcaagaactggaggaacctgatcgcggtgctgggcgagcacgacctcagcgagcacgacggggatgagcagagccggcgggtggcgcaggtcatcatccccagcacgtacgtcccgggcaccaccaaccacgacatcgcgctgctccgcctgcaccagcccgtggtcctcactgaccatgtggtgcccctctgcctgcccgaacggacgttctctgagaggacgctggccttcgtgcgcttctcattggtcagcggctggggccagctgctggaccgtggcgccacggccctggagctcatggtgctcaacgtgccccggctgatgacccaggactgcctgcagcagtcacggaaggtgggagactccccaaatatcacggagtacatgttctgtgccggctactcggatggcagcaaggactcctgcaagggggacagtggaggcccacatgccacccactaccggggcacgtggtacctgacgggcatcgtcagctggggccagggctgcgcaaccgtgggccactttggggtgtacaccagggtctcccagtacatcgagtggctgcaaaagctcatgcgctcagagccacgcccaggagtcctcctgcgagccccatttccctagcccagcagccctggcctgtggagagaaagccaaggctgcgtcgaactgtcctggcaccaaatcccatatattcttctgcagttaatggggtagaggagggcatgggagggagggagaggtggggagggagacagagacagaaacagagagagacagagacagagagagactgagggagagactctgaggacatggagagagactcaaagagactccaagattcaaagagactaatagagacacagagatggaatagaaaagatgagaggcagaggcagacaggcgctggacagaggggcaggggagtgccaaggttgtcctggaggcagacagcccagctgagcctccttacctcccttcagccaagccccacctgcacgtgatctgctggccctcaggctgctgctctgccttcattgctggagacagtagaggcatgaacacacatggatgcacacacacacacgccaatgcacacacacagagatatgcacacacacggatgcacacacagatggtcacacagagatacgcaaacacaccgatgcacacgcacatagagatatgcacacacagatgcacacacagatatacacatggatgcacgcacatgccaatgcacgcacacatcagtgcacacggatgcacagagatatgcacacaccgatgtgcgcacacacagatatgcacacacatggatgagcacacacacaccaagtgcgcacacacaccgatgtacacacacagatgcacacacagatgcacacacaccgatgctgactccatgtgtgctgtcctctgaaggcggttgtttagctctcacttttctggttcttatccattatcatcttcacttcagacaattcagaagcatcaccatgcatggtggcgaatgcccccaaactctcccccaaatgtatttctcccttcgctgggtgccgggctgcacagactattccccacctgcttcccagcttcacaataaacggctgcgtctcctccgcacacctgtggtgcctgccaccc

SEQ ID NO: 2476 - protein, 2224 aa, Homo sapiens
MFPGCPRLWVLVVLGTSWVGWGSQGTEAAQLRQFYVAAQGISWSYRPEPTNSSLNLSVTSFKKIVYREYEPYFKKEKPQSTISGLLGPTLYAEVGDIIKVHFKNKADKPLSIHPQGIRYSKLSEGASYLDHTFPAEKMDDAVAPGREYTYEWSISEDSGPTHDDPPCLTHIYYSHENLIEDFNSGLIGPLLICKKGTLTEGGTQKTFDKQIVLLFAVFDESKSWSQSSSLMYTVNGYVNGTMPDITVCAHDHISWHLLGMSSGPELFSIHFNGQVLEQNHHKVSAITLVSATSTTANMTVGPEGKWIISSLTPKHLQAGMQAYIDIKNCPKKTRNLKKITREQRRHMKRWEYFIAAEEVIWDYAPVIPANMDKKYRSQHLDNFSNQIGKHYKKVMYTQYEDESFTKHTVNPNMKEDGILGPIIRAQVRDTLKIVFKNMASRPYSIYPHGVTFSPYEDEVNSSFTSGRNNTMIRAVQPGETYTYKWNILEFDEPTENDAQCLTRPYYSDVDIMRDIASGLIGLLLICKSRSLDRRGIQRAADIEQQAVFAVFDENKSWYLEDNINKFCENPDEVKRDDPKFYESNIMSTINGYVPESITTLGFCFDDTVQWHFCSVGTQNEILTIHFTGHSFIYGKRHEDTLTLFPMRGESVTVTMDNVGTWMLTSMNSSPRSKKLRLKFRDVKCIPDDDEDSYEIFEPPESTVMATRKMHDRLEPEDEESDADYDYQNRLAAALGIRSFRNSSLNQEEEEFNLTALALENGTEFVSSNTDIIVGSNYSSPSNISKFTVNNLAEPQKAPSHQQATTAGSPLRHLIGKNSVLNSSTAEHSSPYSEDPIEDPLQPDVTGIRLLSLGAGEFRSQEHAKRKGPKVERDQAAKHRFSWMKLLAHKVGRHLSQDTGSPSGMRPWEDLPSQDTGSPSRMRPWEDPPSDLLLLKQSNSSKILVGRWHLASEKGSYEIIQDTDEDTAVNNWLISPQNASRAWGESTPLANKPGKQSGHPKFPRVRHKSLQVRQDGGKSRLKKSQFLIKTRKKKKEKHTHHAPLSPRTFHPLRSEAYNTFSERRLKHSLVLHKSNETSLPTDLNQTLPSMDFGWIASLPDHNQNSSNDTGQASCPPGLYQTVPPEEHYQTFPIQDPDQMHSTSDPSHRSSSPELSEMLEYDRSHKSFPTDISQMSPSSEHEVWQTVISPDLSQVTLSPELSQTNLSPDLSHTTLSPELIQRNLSPALGQMPISPDLSHTTLSPDLSHTTLSLDLSQTNLSPELSQTNLSPALGQMPLSPDLSHTTISLDFSQTNLSPELSHMTLSPELSQTNLSPALGQMPISPDLSHTTLSLDFSQTNLSPELSQTNLSPALGQMPLSPDPSHTTLSLDLSQTNLSPELSQTNLSPDLSEMPLFADLSQIPLTPDLDQMTLSPDLGETDLSPNFGQMSLSPDLSQVTLSPDISDTTLLPDLSQISPPPDLDQIFYPSESSQSLLLQEFNESFPYPDLGQMPSPSSPTLNDTFLSKEFNPLVIVGLSKDGTDYIEIIPKEEVQSSEDDYAEIDYVPYDDPYKTDVRTNINSSRDPDNIAAWYLRSNNGNRRNYYIAAEEISWDYSEFVQRETDIEDSDDIPEDTTYKKVVFRKYLDSTFTKRDPRGEYEEHLGILGPIIRAEVDDVIQVRFKNLASRPYSLHAHGLSYEKSSEGKTYEDDSPEWFKEDNAVQPNSSYTYVWHATERSGPESPGSACRAWAYYSAVNPEKDIHSGLIGPLLICQKGILHKDSNMPVDMREFVLLFMTFDEKKSWYYEKKSRSSWRLTSSEMKKSHEFHAINGMIYSLPGLKMYEQEWVRLHLLNIGGSQDIHVVHFHGQTLLENGNKQHQLGVWPLLPGSFKTLEMKASKPGWWLLNTEVGENQRAGMQTPFLIMDRDCRMPMGLSTGIISDSQIKASEFLGYWEPRLARLNNGGSYNAWSVEKLAAEFASKPWIQVDMQKEVIITGIQTQGAKHYLKSCYTTEFYVAYSSNQINWQIFKGNSTRNVMYFNGNSDASTIKENQFDPPIVARYIRISPTRAYNRPTLRLELQGCEVNGCSTPLGMENGKIENKQITASSFKKSWWGDYWEPFRARLNAQGRVNAWQAKANNNKQWLEIDLLKIKKITAIITQGCKSLSSEMYVKSYTIHYSEQGVEWKPYRLKSSMVDKIFEGNTNTKGHVKNFFNPPIISRFIRVIPKTWNQSIALRLELFGCDIY

SEQ ID NO: 2477 - DNA, 6914 bp, Homo sapiens
tcattgcagctgggacagcccggagtgtggttagcagctcggcaagcgctgcccaggtcctggggtggtggcagccagcgggagcaggaaaggaagcatgttcccaggctgcccacgcctctgggtcctggtggtcttgggcaccagctgggtaggctgggggagccaagggacagaagcggcacagctaaggcagttctacgtggctgctcagggcatcagttggagctaccgacctgagcccacaaactcaagtttgaatctttctgtaacttcctttaagaaaattgtctacagagagtatgaaccatattttaagaaagaaaaaccacaatctaccatttcaggacttcttgggcctactttatatgctgaagtcggagacatcataaaagttcactttaaaaataaggcagataagcccttgagcatccatcctcaaggaattaggtacagtaaattatcagaaggtgcttcttaccttgaccacacattccctgcagagaagatggacgacgctgtggctccaggccgagaatacacctatgaatggagtatcagtgaggacagtggacccacccatgatgaccctccatgcctcacacacatctattactcccatgaaaatctgatcgaggatttcaactctgggctgattgggcccctgcttatctgtaaaaaagggaccctaactgagggtgggacacagaagacgtttgacaagcaaatcgtgctactatttgctgtgtttgatgaaagcaagagctggagccagtcatcatccctaatgtacacagtcaatggatatgtgaatgggacaatgccagatataacagtttgtgcccatgaccacatcagctggcatctgctgggaatgagctcggggccagaattattctccattcatttcaacggccaggtcctggagcagaaccatcataaggtctcagccatcacccttgtcagtgctacatccactaccgcaaatatgactgtgggcccagagggaaagtggatcatatcttctctcaccccaaaacatttgcaagctgggatgcaggcttacattgacattaaaaactgcccaaagaaaaccaggaatcttaagaaaataactcgtgagcagaggcggcacatgaagaggtgggaatacttcattgctgcagaggaagtcatttgggactatgcacctgtaataccagcgaatatggacaaaaaatacaggtctcagcatttggataatttctcaaaccaaattggaaaacattataagaaagttatgtacacacagtacgaagatgagtccttcaccaaacatacagtgaatcccaatatgaaagaagatgggattttgggtcctattatcagagcccaggtcagagacacactcaaaatcgtgttcaaaaatatggccagccgcccctatagcatttaccctcatggagtgaccttctcgccttatgaagatgaagtcaactcttctttcacctcaggcaggaacaacaccatgatcagagcagttcaaccaggggaaacctatacttataagtggaacatcttagagtttgatgaacccacagaaaatgatgcccagtgcttaacaagaccatactacagtgacgtggacatcatgagagacatcgcctctgggctaataggactacttctaatctgtaagagcagatccctggacaggcgaggaatacagagggcagcagacatcgaacagcaggctgtgtttgctgtgtttgatgagaacaaaagctggtaccttgaggacaacatcaacaagttttgtgaaaatcctgatgaggtgaaacgtgatgaccccaagttttatgaatcaaacatcatgagcactatcaatggctatgtgcctgagagcataactactcttggattctgctttgatgacactgtccagtggcacttctgtagtgtggggacccagaatgaaattttgaccatccacttcactgggcactcattcatctatggaaagaggcatgaggacaccttgaccctcttccccatgcgtggagaatctgtgacggtcacaatggataatgttggaacttggatgttaacttccatgaattctagtccaagaagcaaaaagctgaggctgaaattcagggatgttaaatgtatcccagatgatgatgaagactcatatgagatttttgaacctccagaatctacagtcatggctacacggaaaatgcatgatcgtttagaacctgaagatgaagagagtgatgctgactatgattaccagaacagactggctgcagcattaggaattaggtcattccgaaactcatcattgaaccaggaagaagaagagttcaatcttactgccctagctctggagaatggcactgaattcgtttcttcgaacacagatataattgttggttcaaattattcttccccaagtaatattagtaagttcactgtcaataaccttgcagaacctcagaaagccccttctcaccaacaagccaccacagctggttccccactgagacacctcattggcaagaactcagttctcaattcttccacagcagagcattccagcccatattctgaagaccctatagaggatcctctacagccagatgtcacagggatacgtctactttcacttggtgctggagaattcagaagtcaagaacatgctaagcgtaagggacccaaggtagaaagagatcaagcagcaaagcacaggttctcctggatgaaattactagcacataaagttgggagacacctaagccaagacactggttctccttccggaatgaggccctgggaggaccttcctagccaagacactggttctccttccagaatgaggccctgggaggaccctcctagtgatctgttactcttaaaacaaagtaactcatctaagattttggttgggagatggcatttggcttctgagaaaggtagctatgaaataatccaagatactgatgaagacacagctgttaacaattggctgatcagcccccagaatgcctcacgtgcttggggagaaagcacccctcttgccaacaagcctggaaagcagagtggccacccaaagtttcctagagttagacataaatctctacaagtaagacaggatggaggaaagagtagactgaagaaaagccagtttctcattaagacacgaaaaaagaaaaaagagaagcacacacaccatgctcctttatctccgaggacctttcaccctctaagaagtgaagcctacaacacattttcagaaagaagacttaagcattcgttggtgcttcataaatccaatgaaacatctcttcccacagacctcaatcagacattgccctctatggattttggctggatagcctcacttcctgaccataatcagaattcctcaaatgacactggtcaggcaagctgtcctccaggtctttatcagacagtgcccccagaggaacactatcaaacattccccattcaagaccctgatcaaatgcactctacttcagaccccagtcacagatcctcttctccagagctcagtgaaatgcttgagtatgaccgaagtcacaagtccttccccacagatataagtcaaatgtccccttcctcagaacatgaagtctggcagacagtcatctctccagacctcagccaggtgaccctctctccagaactcagccagacaaacctctctccagacctcagccacacgactctctctccagaactcattcagagaaacctttccccagccctcggtcagatgcccatttctccagacctcagccatacaaccctttctccagacctcagccatacaaccctttctttagacctcagccagacaaacctctctccagaactcagtcagacaaacctttctccagccctcggtcagatgcccctttctccagacctcagccatacaaccatttctctagacttcagccagacaaacctctctccagaactcagccatatgactctctctccagaactcagtcagacaaacctttccccagccctcggtcagatgcccatttctccagacctcagccatacaaccctttctctagacttcagccagacaaacctctctccagaactcagtcaaacaaacctttccccagccctcggtcagatgcccctttctccagaccccagccatacaaccctttctctagacctcagccagacaaacctctctccagaactcagtcagacaaacctttccccagacctcagtgagatgcccctctttgcagatctcagtcaaattccccttaccccagacctcgaccagatgacactttctccagaccttggtgagacagatctttccccaaactttggtcagatgtccctttccccagacctcagccaggtgactctctctccagacatcagtgacaccacccttctcccggatctcagccagatatcacctcctccagaccttgatcagatattctacccttctgaatctagtcagtcattgcttcttcaagaatttaatgagtcttttccttatccagaccttggtcagatgccatctccttcatctcctactctcaatgatacttttctatcaaaggaatttaatccactggttatagtgggcctcagtaaagatggtacagattacattgagatcattccaaaggaagaggtccagagcagtgaagatgactatgctgaaattgattatgtgccctatgatgacccctacaaaactgatgttaggacaaacatcaactcctccagagatcctgacaacattgcagcatggtacctccgcagcaacaatggaaacagaagaaattattacattgctgctgaagaaatatcctgggattattcagaatttgtacaaagggaaacagatattgaagactctgatgatattccagaagataccacatataagaaagtagtttttcgaaagtacctcgacagcacttttaccaaacgtgatcctcgaggggagtatgaagagcatctcggaattcttggtcctattatcagagctgaagtggatgatgttatccaagttcgttttaaaaatttagcatccagaccgtattctctacatgcccatggactttcctatgaaaaatcatcagagggaaagacttatgaagatgactctcctgaatggtttaaggaagataatgctgttcagccaaatagcagttatacctacgtatggcatgccactgagcgatcagggccagaaagtcctggctctgcctgtcgggcttgggcctactactcagctgtgaacccagaaaaagatattcactcaggcttgataggtcccctcctaatctgccaaaaaggaatactacataaggacagcaacatgcctgtggacatgagagaatttgtcttactatttatgacctttgatgaaaagaagagctggtactatgaaaagaagtcccgaagttcttggagactcacatcctcagaaatgaaaaaatcccatgagtttcacgccattaatgggatgatctacagcttgcctggcctgaaaatgtatgagcaagagtgggtgaggttacacctgctgaacataggcggctcccaagacattcacgtggttcactttcacggccagaccttgctggaaaatggcaataaacagcaccagttaggggtctggccccttctgcctggttcatttaaaactcttgaaatgaaggcatcaaaacctggctggtggctcctaaacacagaggttggagaaaaccagagagcagggatgcaaacgccatttcttatcatggacagagactgtaggatgccaatgggactaagcactggtatcatatctgattcacagatcaaggcttcagagtttctgggttactgggagcccagattagcaagattaaacaatggtggatcttataatgcttggagtgtagaaaaacttgcagcagaatttgcctctaaaccttggatccaggtggacatgcaaaaggaagtcataatcacagggatccagacccaaggtgccaaacactacctgaagtcctgctataccacagagttctatgtagcttacagttccaaccagatcaactggcagatcttcaaagggaacagcacaaggaatgtgatgtattttaatggcaattcagatgcctctacaataaaagagaatcagtttgacccacctattgtggctagatatattaggatctctccaactcgagcctataacagacctacccttcgattggaactgcaaggttgtgaggtaaatggatgttccacacccctgggtatggaaaatggaaagatagaaaacaagcaaatcacagcttcttcgtttaagaaatcttggtggggagattactgggaacccttccgtgcccgtctgaatgcccagggacgtgtgaatgcctggcaagccaaggcaaacaacaataagcagtggctagaaattgatctactcaagatcaagaagataacggcaattataacacagggctgcaagtctctgtcctctgaaatgtatgtaaagagctataccatccactacagtgagcagggagtggaatggaaaccatacaggctgaaatcctccatggtggacaagatttttgaaggaaatactaataccaaaggacatgtgaagaactttttcaaccccccaatcatttccaggtttatccgtgtcattcctaaaacatggaatcaaagtattgcacttcgcctggaactctttggctgtgatatttactagaattgaacattcaaaaacccctggaagagactctttaagacctcaaaccatttagaatgggcaatgtattttacgctgtgttaaatgttaacagttttccactatttctctttcttttctattagtgaataaaattttatac

SEQ ID NO: 2478 - protein, 622 aa, Homo sapiens
MAHVRGLQLPGCLALAALCSLVHSQHVFLAPQQARSLLQRVRRANTFLEEVRKGNLERECVEETCSYEEAFEALESSTATDVFWAKYTACETARTPRDKLAACLEGNCAEGLGTNYRGHVNITRSGIECQLWRSRYPHKPEINSTTHPGADLQENFCRNPDSSTTGPWCYTTDPTVRRQECSIPVCGQDQVTVAMTPRSEGSSVNLSPPLEQCVPDRGQQYQGRLAVTTHGLPCLAWASAQAKALSKHQDFNSAVQLVENFCRNPDGDEEGVWCYVAGKPGDFGYCDLNYCEEAVEEETGDGLDEDSDRAIEGRTATSEYQTFFNPRTFGSGEADCGLRPLFEKKSLEDKTERELLESYIDGRIVEGSDAEIGMSPWQVMLFRKSPQELLCGASLISDRWVLTAAHCLLYPPWDKNFTENDLLVRIGKHSRTRYERNIEKISMLEKIYIHPRYNWRENLDRDIALMKLKKPVAFSDYIHPVCLPDRETAASLLQAGYKGRVTGWGNLKETWTANVGKGQPSVLQVVNLPIVERPVCKDSTRIRITDNMFCAGYKPDEGKRGDACEGDSGGPFVMKSPFNNRWYQMGIVSWGEGCDRDGKYGFYTHVFRLKKWIQKVIDQFGE

SEQ ID NO: 2479 - DNA, 1997 bp, Homo sapiens
aattcctcagtgacccaggagctgacacactatggcgcacgtccgaggcttgcagctgcctggctgcctggccctggctgccctgtgtagccttgtgcacagccagcatgtgttcctggctcctcagcaagcacggtcgctgctccagcgggtccggcgagccaacaccttcttggaggaggtgcgcaagggcaacctagagcgagagtgcgtggaggagacgtgcagctacgaggaggccttcgaggctctggagtcctccacggctacggatgtgttctgggccaagtacacagcttgtgagacagcgaggacgcctcgagataagcttgctgcatgtctggaaggtaactgtgctgagggtctgggtacgaactaccgagggcatgtgaacatcacccggtcaggcattgagtgccagctatggaggagtcgctacccacataagcctgaaatcaactccactacccatcctggggccgacctacaggagaatttctgccgcaaccccgacagcagcaccacgggaccctggtgctacactacagaccccaccgtgaggaggcaggaatgcagcatccctgtctgtggccaggatcaagtcactgtagcgatgactccacgctccgaaggctccagtgtgaatctgtcacctccattggagcagtgtgtccctgatcgggggcagcagtaccaggggcgcctggcggtgaccacacatgggctcccctgcctggcctgggccagcgcacaggccaaggccctgagcaagcaccaggacttcaactcagctgtgcagctggtggagaacttctgccgcaacccagacggggatgaggagggcgtgtggtgctatgtggccgggaagcctggcgactttgggtactgcgacctcaactattgtgaggaggccgtggaggaggagacaggagatgggctggatgaggactcagacagggccatcgaagggcgtaccgccaccagtgagtaccagactttcttcaatccgaggacctttggctcgggagaggcagactgtgggctgcgacctctgttcgagaagaagtcgctggaggacaaaaccgaaagagagctcctggaatcctacatcgacgggcgcattgtggagggctcggatgcagagatcggcatgtcaccttggcaggtgatgcttttccggaagagtccccaggagctgctgtgtggggccagcctcatcagtgaccgctgggtcctcaccgccgcccactgcctcctgtacccgccctgggacaagaacttcaccgagaatgaccttctggtgcgcattggcaagcactcccgcacaaggtacgagcgaaacattgaaaagatatccatgttggaaaagatctacatccaccccaggtacaactggcgggagaacctggaccgggacattgccctgatgaagctgaagaagcctgttgccttcagtgactacattcaccctgtgtgtctgcccgacagggagacggcagccagcttgctccaggctggatacaaggggcgggtgacaggctggggcaacctgaaggagacgtggacagccaacgttggtaaggggcagcccagtgtcctgcaggtggtgaacctgcccattgtggagcggccggtctgcaaggactccacccggatccgcatcactgacaacatgttctgtgctggttacaagcctgatgaagggaaacgaggggatgcctgtgaaggtgacagtgggggaccctttgtcatgaagagcccctttaacaaccgctggtatcaaatgggcatcgtctcatggggtgaaggctgtgaccgggatgggaaatatggcttctacacacatgtgttccgcctgaagaagtggatacagaaggtcattgatcagtttggagagtaggggccactcatattctgggctcctggaaccaatcccgtgaaagaattatttttgtgtttctaaaactatggttcccaataaaagtgactctcagcgg

SEQ ID NO: 2480 - protein, 165 aa, Homo sapiens
APPRLICDSRVLERYLLEAKEAENITTGCAEHCSLNENITVPDTKVNFYAWKRMEVGQQAVEVWQGLALLSEAVLRGQALLVNSSQPWEPLQLHVDKAVSGLRSLTTLLRALGAQKEAISPPDAASAAPLRTITADTFRKLFRVYSNFLRGKLKLYTGEACRTGD

SEQ ID NO: 2481 - protein, 166 aa, Homo sapiens
APPRLICDSRVLERYLLEAKEAENITTGCAEHCSLNENITVPDTKVNFYAWKRMEVGQQAVEVWQGLALLSEAVLRGQALLVNSSQPWEPLQLHVDKAVSGLRSLTTLLRALGAQKEAISPPDAASAAPLRTITADTFRKLFRVYSNFLRGKLKLYTGEACRTGDR

SEQ ID NO: 2482 - DNA, 12 bp, Artificial Sequence
  Description of Artificial Sequence: Synthetic oligonucleotide
  modified_base (12)..(12): a, c, g, t, unknown or other
aayaayaayacn

SEQ ID NO: 2483 - DNA, 12 bp, Artificial Sequence
  Description of Artificial Sequence: Synthetic oligonucleotide
  modified_base (3)..(3): a, c, g, t, unknown or other
acnaayaayaay

SEQ ID NO: 2484 - DNA, 12 bp, Artificial Sequence
  Description of Artificial Sequence: Synthetic oligonucleotide
  modified_base (6)..(6): a, c, g, t, unknown or other
aayacnaayaay

SEQ ID NO: 2485 - DNA, 12 bp, Artificial Sequence
  Description of Artificial Sequence: Synthetic oligonucleotide
  modified_base (9)..(9): a, c, g, t, unknown or other
aayaayacnaay

SEQ ID NO: 2486 - DNA, 15 bp, Artificial Sequence
  Description of Artificial Sequence: Synthetic oligonucleotide
  modified_base (15)..(15): a, c, g, t, unknown or other
aayaayaayaayacn

SEQ ID NO: 2487 - DNA, 15 bp, Artificial Sequence
  Description of Artificial Sequence: Synthetic oligonucleotide
  modified_base (3)..(3): a, c, g, t, unknown or other
acnaayaayaayaay

SEQ ID NO: 2488 - DNA, 15 bp, Artificial Sequence
  Description of Artificial Sequence: Synthetic oligonucleotide
  modified_base (6)..(6): a, c, g, t, unknown or other
aayacnaayaayaay

SEQ ID NO: 2489 - DNA, 15 bp, Artificial Sequence
  Description of Artificial Sequence: Synthetic oligonucleotide
  modified_base (9)..(9): a, c, g, t, unknown or other
aayaayacnaayaay

SEQ ID NO: 2490 - DNA, 15 bp, Artificial Sequence
  Description of Artificial Sequence: Synthetic oligonucleotide
  modified_base (12)..(12): a, c, g, t, unknown or other
aayaayaayacnaay

SEQ ID NO: 2491 - DNA, 15 bp, Artificial Sequence
  Description of Artificial Sequence: Synthetic oligonucleotide
  modified_base (12)..(12): a, c, g, t, unknown or other
  modified_base (15)..(15): a, c, g, t, unknown or other
aayaayaayacnacn

SEQ ID NO: 2492 - DNA, 15 bp, Artificial Sequence
  Description of Artificial Sequence: Synthetic oligonucleotide
  modified_base (3)..(3): a, c, g, t, unknown or other
  modified_base (6)..(6): a, c, g, t, unknown or other
acnacnaayaayaay

SEQ ID NO: 2493 - DNA, 15 bp, Artificial Sequence
  Description of Artificial Sequence: Synthetic oligonucleotide
  modified_base (3)..(3): a, c, g, t, unknown or other
  modified_base (9)..(9): a, c, g, t, unknown or other
acnaayacnaayaay

SEQ ID NO: 2494 - DNA, 15 bp, Artificial Sequence
  Description of Artificial Sequence: Synthetic oligonucleotide
  modified_base (3)..(3): a, c, g, t, unknown or other
  modified_base (12)..(12): a, c, g, t, unknown or other
acnaayaayacnaay

SEQ ID NO: 2495 - DNA, 15 bp, Artificial Sequence
  Description of Artificial Sequence: Synthetic oligonucleotide
  modified_base (3)..(3): a, c, g, t, unknown or other
  modified_base (15)..(15): a, c, g, t, unknown or other
acnaayaayaayacn

SEQ ID NO: 2496 - DNA, 15 bp, Artificial Sequence
  Description of Artificial Sequence: Synthetic oligonucleotide
  modified_base (6)..(6): a, c, g, t, unknown or other
  modified_base (9)..(9): a, c, g, t, unknown or other
aayacnacnaayaay

SEQ ID NO: 2497 - DNA, 15 bp, Artificial Sequence
  Description of Artificial Sequence: Synthetic oligonucleotide
  modified_base (6)..(6): a, c, g, t, unknown or other
  modified_base (12)..(12): a, c, g, t, unknown or other
aayacnaayacnaay

SEQ ID NO: 2498 - DNA, 15 bp, Artificial Sequence
  Description of Artificial Sequence: Synthetic oligonucleotide
  modified_base (6)..(6): a, c, g, t, unknown or other
  modified_base (15)..(15): a, c, g, t, unknown or other
aayacnaayaayacn

SEQ ID NO: 2499 - DNA, 15 bp, Artificial Sequence
  Description of Artificial Sequence: Synthetic oligonucleotide
  modified_base (9)..(9): a, c, g, t, unknown or other
  modified_base (12)..(12): a, c, g, t, unknown or other
aayaayacnacnaay

SEQ ID NO: 2500 - DNA, 15 bp, Artificial Sequence
  Description of Artificial Sequence: Synthetic oligonucleotide
  modified_base (9)..(9): a, c, g, t, unknown or other
  modified_base (15)..(15): a, c, g, t, unknown or other
aayaayacnaayacn

SEQ ID NO: 2501 - DNA, 18 bp, Artificial Sequence
  Description of Artificial Sequence: Synthetic oligonucleotide
  modified_base (18)..(18): a, c, g, t, unknown or other
aayaayaayaayaayacn

SEQ ID NO: 2502 - DNA, 18 bp, Artificial Sequence
  Description of Artificial Sequence: Synthetic oligonucleotide
  modified_base (3)..(3): a, c, g, t, unknown or other
acnaayaayaayaayaay

SEQ ID NO: 2503 - DNA, 18 bp, Artificial Sequence
  Description of Artificial Sequence: Synthetic oligonucleotide
  modified_base (6)..(6): a, c, g, t, unknown or other
aayacnaayaayaayaay

SEQ ID NO: 2504 - DNA, 18 bp, Artificial Sequence
  Description of Artificial Sequence: Synthetic oligonucleotide
  modified_base (9)..(9): a, c, g, t, unknown or other
aayaayacnaayaayaay

SEQ ID NO: 2505 - DNA, 18 bp, Artificial Sequence
  Description of Artificial Sequence: Synthetic oligonucleotide
  modified_base (12)..(12): a, c, g, t, unknown or other
aayaayaayacnaayaay

SEQ ID NO: 2506 - DNA, 18 bp, Artificial Sequence
  Description of Artificial Sequence: Synthetic oligonucleotide
  modified_base (15)..(15): a, c, g, t, unknown or other
aayaayaayaayacnaay

SEQ ID NO: 2507 - DNA, 18 bp, Artificial Sequence
  Description of Artificial Sequence: Synthetic oligonucleotide
  modified_base (15)..(15): a, c, g, t, unknown or other
  modified_base (18)..(18): a, c, g, t, unknown or other
aayaayaayaayacnacn

SEQ ID NO: 2508 - DNA, 18 bp, Artificial Sequence
  Description of Artificial Sequence: Synthetic oligonucleotide
  modified_base (3)..(3): a, c, g, t, unknown or other
  modified_base (6)..(6): a, c, g, t, unknown or other
acnacnaayaayaayaay

SEQ ID NO: 2509 - DNA, 18 bp, Artificial Sequence
  Description of Artificial Sequence: Synthetic oligonucleotide
  modified_base (3)..(3): a, c, g, t, unknown or other
  modified_base (9)..(9): a, c, g, t, unknown or other
acnaayacnaayaayaay

SEQ ID NO: 2510 - DNA, 18 bp, Artificial Sequence
  Description of Artificial Sequence: Synthetic oligonucleotide
  modified_base (3)..(3): a, c, g, t, unknown or other
  modified_base (12)..(12): a, c, g, t, unknown or other
acnaayaayacnaayaay

SEQ ID NO: 2511 - DNA, 18 bp, Artificial Sequence
  Description of Artificial Sequence: Synthetic oligonucleotide
  modified_base (3)..(3): a, c, g, t, unknown or other
  modified_base (15)..(15): a, c, g, t, unknown or other
acnaayaayaayacnaay

SEQ ID NO: 2512 - DNA, 18 bp, Artificial Sequence
  Description of Artificial Sequence: Synthetic oligonucleotide
  modified_base (3)..(3): a, c, g, t, unknown or other
  modified_base (18)..(18): a, c, g, t, unknown or other
acnaayaayaayaayacn

SEQ ID NO: 2513 - DNA, 18 bp, Artificial Sequence
  Description of Artificial Sequence: Synthetic oligonucleotide
  modified_base (6)..(6): a, c, g, t, unknown or other
  modified_base (9)..(9): a, c, g, t, unknown or other
aayacnacnaayaayaay

SEQ ID NO: 2514 - DNA, 18 bp, Artificial Sequence
  Description of Artificial Sequence: Synthetic oligonucleotide
  modified_base (6)..(6): a, c, g, t, unknown or other
  modified_base (12)..(12): a, c, g, t, unknown or other
aayacnaayacnaayaay

SEQ ID NO: 2515 - DNA, 18 bp, Artificial Sequence
  Description of Artificial Sequence: Synthetic oligonucleotide
  modified_base (6)..(6): a, c, g, t, unknown or other
  modified_base (15)..(15): a, c, g, t, unknown or other
aayacnaayaayacnaay

SEQ ID NO: 2516 - DNA, 18 bp, Artificial Sequence
  Description of Artificial Sequence: Synthetic oligonucleotide
  modified_base (6)..(6): a, c, g, t, unknown or other
  modified_base (18)..(18): a, c, g, t, unknown or other
aayacnaayaayaayacn

SEQ ID NO: 2517 - DNA, 18 bp, Artificial Sequence
  Description of Artificial Sequence: Synthetic oligonucleotide
  modified_base (9)..(9): a, c, g, t, unknown or other
  modified_base (12)..(12): a, c, g, t, unknown or other
aayaayacnacnaayaay

SEQ ID NO: 2518 - DNA, 18 bp, Artificial Sequence
  Description of Artificial Sequence: Synthetic oligonucleotide
  modified_base (9)..(9): a, c, g, t, unknown or other
  modified_base (15)..(15): a, c, g, t, unknown or other
aayaayacnaayacnaay

SEQ ID NO: 2519 - DNA, 18 bp, Artificial Sequence
  Description of Artificial Sequence: Synthetic oligonucleotide
  modified_base (9)..(9): a, c, g, t, unknown or other
  modified_base (18)..(18): a, c, g, t, unknown or other
aayaayacnaayaayacn

SEQ ID NO: 2520 - DNA, 18 bp, Artificial Sequence
  Description of Artificial Sequence: Synthetic oligonucleotide
  modified_base (12)..(12): a, c, g, t, unknown or other
  modified_base (15)..(15): a, c, g, t, unknown or other
aayaayaayacnacnaay

SEQ ID NO: 2521 - DNA, 18 bp, Artificial Sequence
  Description of Artificial Sequence: Synthetic oligonucleotide
  modified_base (12)..(12): a, c, g, t, unknown or other
  modified_base (18)..(18): a, c, g, t, unknown or other
aayaayaayacnaayacn

SEQ ID NO: 2522 - DNA, 21 bp, Artificial Sequence
  Description of Artificial Sequence: Synthetic oligonucleotide
  modified_base (15)..(15): a, c, g, t, unknown or other
  modified_base (18)..(18): a, c, g, t, unknown or other
  modified_base (21)..(21): a, c, g, t, unknown or other
aayaayaayaayacnacnacn

SEQ ID NO: 2523 - DNA, 21 bp, Artificial Sequence
  Description of Artificial Sequence: Synthetic oligonucleotide
  modified_base (3)..(3): a, c, g, t, unknown or other
  modified_base (6)..(6): a, c, g, t, unknown or other
  modified_base (9)..(9): a, c, g, t, unknown or other
acnacnacnaayaayaayaay

SEQ ID NO: 2524 - DNA, 21 bp, Artificial Sequence
  Description of Artificial Sequence: Synthetic oligonucleotide
  modified_base (3)..(3): a, c, g, t, unknown or other
  modified_base (9)..(9): a, c, g, t, unknown or other
  modified_base (12)..(12): a, c, g, t, unknown or other
acnaayacnacnaayaayaay

SEQ ID NO: 2525 - DNA, 21 bp, Artificial Sequence
  Description of Artificial Sequence: Synthetic oligonucleotide
  modified_base (3)..(3): a, c, g, t, unknown or other
  modified_base (9)..(9): a, c, g, t, unknown or other
  modified_base (15)..(15): a, c, g, t, unknown or other
acnaayacnaayacnaayaay

SEQ ID NO: 2526 - DNA, 21 bp, Artificial Sequence
  Description of Artificial Sequence: Synthetic oligonucleotide
  modified_base (3)..(3): a, c, g, t, unknown or other
  modified_base (9)..(9): a, c, g, t, unknown or other
  modified_base (18)..(18): a, c, g, t, unknown or other
acnaayacnaayaayacnaay

SEQ ID NO: 2527 - DNA, 21 bp, Artificial Sequence
  Description of Artificial Sequence: Synthetic oligonucleotide
  modified_base (3)..(3): a, c, g, t, unknown or other
  modified_base (9)..(9): a, c, g, t, unknown or other
  modified_base (21)..(21): a, c, g, t, unknown or other
acnaayacnaayaayaayacn

SEQ ID NO: 2528 - DNA, 21 bp, Artificial Sequence
  Description of Artificial Sequence: Synthetic oligonucleotide
  modified_base (3)..(3): a, c, g, t, unknown or other
  modified_base (12)..(12): a, c, g, t, unknown or other
  modified_base (15)..(15): a, c, g, t, unknown or other
acnaayaayacnacnaayaay

SEQ ID NO: 2529 - DNA, 21 bp, Artificial Sequence
  Description of Artificial Sequence: Synthetic oligonucleotide
  modified_base (3)..(3): a, c, g, t, unknown or other
  modified_base (12)..(12): a, c, g, t, unknown or other
  modified_base (18)..(18): a, c, g, t, unknown or other
acnaayaayacnaayacnaay

SEQ ID NO: 2530 - DNA, 21 bp, Artificial Sequence
  Description of Artificial Sequence: Synthetic oligonucleotide
  modified_base (3)..(3): a, c, g, t, unknown or other
  modified_base (12)..(12): a, c, g, t, unknown or other
  modified_base (21)..(21): a, c, g, t, unknown or other
acnaayaayacnaayaayacn

SEQ ID NO: 2531 - DNA, 21 bp, Artificial Sequence
  Description of Artificial Sequence: Synthetic oligonucleotide
  modified_base (3)..(3): a, c, g, t, unknown or other
  modified_base (15)..(15): a, c, g, t, unknown or other
  modified_base (21)..(21): a, c, g, t, unknown or other
acnaayaayaayacnaayacn

SEQ ID NO: 2532 - DNA, 21 bp, Artificial Sequence
  Description of Artificial Sequence: Synthetic oligonucleotide
  modified_base (3)..(3): a, c, g, t, unknown or other
  modified_base (15)..(15): a, c, g, t, unknown or other
  modified_base (18)..(18): a, c, g, t, unknown or other
acnaayaayaayacnacnaay

SEQ ID NO: 2533 - DNA, 21 bp, Artificial Sequence
  Description of Artificial Sequence: Synthetic oligonucleotide
  modified_base (3)..(3): a, c, g, t, unknown or other
  modified_base (18)..(18): a, c, g, t, unknown or other
  modified_base (21)..(21): a, c, g, t, unknown or other
acnaayaayaayaayacnacn

SEQ ID NO: 2534 - DNA, 21 bp, Artificial Sequence
  Description of Artificial Sequence: Synthetic oligonucleotide
  modified_base (3)..(3): a, c, g, t, unknown or other
  modified_base (6)..(6): a, c, g, t, unknown or other
  modified_base (12)..(12): a, c, g, t, unknown or other
acnacnaayacnaayaayaay

SEQ ID NO: 2535 - DNA, 21 bp, Artificial Sequence
  Description of Artificial Sequence: Synthetic oligonucleotide
  modified_base (3)..(3): a, c, g, t, unknown or other
  modified_base (6)..(6): a, c, g, t, unknown or other
  modified_base (15)..(15): a, c, g, t, unknown or other
acnacnaayaayacnaayaay

SEQ ID NO: 2536 - DNA, 21 bp, Artificial Sequence
  Description of Artificial Sequence: Synthetic oligonucleotide
  modified_base (3)..(3): a, c, g, t, unknown or other
  modified_base (6)..(6): a, c, g, t, unknown or other
  modified_base (18)..(18): a, c, g, t, unknown or other
acnacnaayaayaayacnaay

SEQ ID NO: 2537 - DNA, 21 bp, Artificial Sequence
  Description of Artificial Sequence: Synthetic oligonucleotide
  modified_base (3)..(3): a, c, g, t, unknown or other
  modified_base (6)..(6): a, c, g, t, unknown or other
  modified_base (21)..(21): a, c, g, t, unknown or other
acnacnaayaayaayaayacn

SEQ ID NO: 2538 - DNA, 21 bp, Artificial Sequence
  Description of Artificial Sequence: Synthetic oligonucleotide
  modified_base (6)..(6): a, c, g, t, unknown or other
  modified_base (9)..(9): a, c, g, t, unknown or other
  modified_base (12)..(12): a, c, g, t, unknown or other
aayacnacnacnaayaayaay

SEQ ID NO: 2539 - DNA, 21 bp, Artificial Sequence
  Description of Artificial Sequence: Synthetic oligonucleotide
  modified_base (6)..(6): a, c, g, t, unknown or other
  modified_base (9)..(9): a, c, g, t, unknown or other
  modified_base (15)..(15): a, c, g, t, unknown or other
aayacnacnaayacnaayaay

SEQ ID NO: 2540 - DNA, 21 bp, Artificial Sequence
  Description of Artificial Sequence: Synthetic oligonucleotide
  modified_base (6)..(6): a, c, g, t, unknown or other
  modified_base (9)..(9): a, c, g, t, unknown or other
  modified_base (18)..(18): a, c, g, t, unknown or other
aayacnacnaayaayacnaay

SEQ ID NO: 2541 - DNA, 21 bp, Artificial Sequence
  Description of Artificial Sequence: Synthetic oligonucleotide
  modified_base (6)..(6): a, c, g, t, unknown or other
  modified_base (9)..(9): a, c, g, t, unknown or other
  modified_base (21)..(21): a, c, g, t, unknown or other
aayacnacnaayaayaayacn

SEQ ID NO: 2542 - DNA, 21 bp, Artificial Sequence
  Description of Artificial Sequence: Synthetic oligonucleotide
  modified_base (6)..(6): a, c, g, t, unknown or other
  modified_base (12)..(12): a, c, g, t, unknown or other
  modified_base (15)..(15): a, c, g, t, unknown or other
aayacnaayacnacnaayaay

SEQ ID NO: 2543 - DNA, 21 bp, Artificial Sequence
  Description of Artificial Sequence: Synthetic oligonucleotide
  modified_base (6)..(6): a, c, g, t, unknown or other
  modified_base (15)..(15): a, c, g, t, unknown or other
  modified_base (18)..(18): a, c, g, t, unknown or other
aayacnaayaayacnacnaay

SEQ ID NO: 2544 - DNA, 21 bp, Artificial Sequence
  Description of Artificial Sequence: Synthetic oligonucleotide
  modified_base (6)..(6): a, c, g, t, unknown or other
  modified_base (18)..(18): a, c, g, t, unknown or other
  modified_base (21)..(21): a, c, g, t, unknown or other
aayacnaayaayaayacnacn

SEQ ID NO: 2545 - DNA, 21 bp, Artificial Sequence
  Description of Artificial Sequence: Synthetic oligonucleotide
  modified_base (6)..(6): a, c, g, t, unknown or other
  modified_base (12)..(12): a, c, g, t, unknown or other
  modified_base (18)..(18): a, c, g, t, unknown or other
aayacnaayacnaayacnaay

SEQ ID NO: 2546 - DNA, 21 bp, Artificial Sequence
  Description of Artificial Sequence: Synthetic oligonucleotide
  modified_base (6)..(6): a, c, g, t, unknown or other
  modified_base (12)..(12): a, c, g, t, unknown or other
  modified_base (21)..(21): a, c, g, t, unknown or other
aayacnaayacnaayaayacn

SEQ ID NO: 2547 - DNA, 21 bp, Artificial Sequence
  Description of Artificial Sequence: Synthetic oligonucleotide
  modified_base (6)..(6): a, c, g, t, unknown or other
  modified_base (15)..(15): a, c, g, t, unknown or other
  modified_base (21)..(21): a, c, g, t, unknown or other
aayacnaayaayacnaayacn

SEQ ID NO: 2548 - DNA, 21 bp, Artificial Sequence
  Description of Artificial Sequence: Synthetic oligonucleotide
  modified_base (9)..(9): a, c, g, t, unknown or other
  modified_base (12)..(12): a, c, g, t, unknown or other
  modified_base (15)..(15): a, c, g, t, unknown or other
aayaayacnacnacnaayaay

SEQ ID NO: 2549 - DNA, 21 bp, Artificial Sequence
  Description of Artificial Sequence: Synthetic oligonucleotide
  modified_base (9)..(9): a, c, g, t, unknown or other
  modified_base (12)..(12): a, c, g, t, unknown or other
  modified_base (18)..(18): a, c, g, t, unknown or other
aayaayacnacnaayacnaay

SEQ ID NO: 2550 - DNA, 21 bp, Artificial Sequence
  Description of Artificial Sequence: Synthetic oligonucleotide
  modified_base (9)..(9): a, c, g, t, unknown or other
  modified_base (12)..(12): a, c, g, t, unknown or other
  modified_base (21)..(21): a, c, g, t, unknown or other
aayaayacnacnaayaayacn

SEQ ID NO: 2551 - DNA, 21 bp, Artificial Sequence
  Description of Artificial Sequence: Synthetic oligonucleotide
  modified_base (9)..(9): a, c, g, t, unknown or other
  modified_base (15)..(15): a, c, g, t, unknown or other
  modified_base (18)..(18): a, c, g, t, unknown or other
aayaayacnaayacnacnaay

SEQ ID NO: 2552 - DNA, 21 bp, Artificial Sequence
  Description of Artificial Sequence: Synthetic oligonucleotide
  modified_base (9)..(9): a, c, g, t, unknown or other
  modified_base (15)..(15): a, c, g, t, unknown or other
  modified_base (21)..(21): a, c, g, t, unknown or other
aayaayacnaayacnaayacn

SEQ ID NO: 2553 - DNA, 21 bp, Artificial Sequence
  Description of Artificial Sequence: Synthetic oligonucleotide
  modified_base (9)..(9): a, c, g, t, unknown or other
  modified_base (18)..(18): a, c, g, t, unknown or other
  modified_base (21)..(21): a, c, g, t, unknown or other
aayaayacnaayaayacnacn

SEQ ID NO: 2554 - DNA, 21 bp, Artificial Sequence
  Description of Artificial Sequence: Synthetic oligonucleotide
  modified_base (12)..(12): a, c, g, t, unknown or other
  modified_base (15)..(15): a, c, g, t, unknown or other
  modified_base (18)..(18): a, c, g, t, unknown or other
aayaayaayacnacnacnaay

SEQ ID NO: 2555 - DNA, 21 bp, Artificial Sequence
  Description of Artificial Sequence: Synthetic oligonucleotide
  modified_base (12)..(12): a, c, g, t, unknown or other
  modified_base (15)..(15): a, c, g, t, unknown or other
  modified_base (21)..(21): a, c, g, t, unknown or other
aayaayaayacnacnaayacn

SEQ ID NO: 2556 - DNA, 21 bp, Artificial Sequence
  Description of Artificial Sequence: Synthetic oligonucleotide
  modified_base (12)..(12): a, c, g, t, unknown or other
  modified_base (18)..(18): a, c, g, t, unknown or other
  modified_base (21)..(21): a, c, g, t, unknown or other
aayaayaayacnaayacnacn

SEQ ID NO: 2557 - DNA, 21 bp, Artificial Sequence
  Description of Artificial Sequence: Synthetic oligonucleotide
  modified_base (18)..(18): a, c, g, t, unknown or other
  modified_base (21)..(21): a, c, g, t, unknown or other
aayaayaayaayaayacnacn

SEQ ID NO: 2558 - DNA, 21 bp, Artificial Sequence
  Description of Artificial Sequence: Synthetic oligonucleotide
  modified_base (3)..(3): a, c, g, t, unknown or other
  modified_base (6)..(6): a, c, g, t, unknown or other
acnacnaayaayaayaayaay

SEQ ID NO: 2559 - DNA, 21 bp, Artificial Sequence
  Description of Artificial Sequence: Synthetic oligonucleotide
  modified_base (3)..(3): a, c, g, t, unknown or other
  modified_base (9)..(9): a, c, g, t, unknown or other
acnaayacnaayaayaayaay

SEQ ID NO: 2560 - DNA, 21 bp, Artificial Sequence
  Description of Artificial Sequence: Synthetic oligonucleotide
  modified_base (3)..(3): a, c, g, t, unknown or other
  modified_base (12)..(12): a, c, g, t, unknown or other
acnaayaayacnaayaayaay

SEQ ID NO: 2561 - DNA, 21 bp, Artificial Sequence
  Description of Artificial Sequence: Synthetic oligonucleotide
  modified_base (3)..(3): a, c, g, t, unknown or other
  modified_base (15)..(15): a, c, g, t, unknown or other
acnaayaayaayacnaayaay

SEQ ID NO: 2562 - DNA, 21 bp, Artificial Sequence
  Description of Artificial Sequence: Synthetic oligonucleotide
  modified_base (3)..(3): a, c, g, t, unknown or other
  modified_base (18)..(18): a, c, g, t, unknown or other
acnaayaayaayaayacnaay

SEQ ID NO: 2563 - DNA, 21 bp, Artificial Sequence
  Description of Artificial Sequence: Synthetic oligonucleotide
  modified_base (3)..(3): a, c, g, t, unknown or other
  modified_base (21)..(21): a, c, g, t, unknown or other
acnaayaayaayaayaayacn

SEQ ID NO: 2564 - DNA, 21 bp, Artificial Sequence
  Description of Artificial Sequence: Synthetic oligonucleotide
  modified_base (6)..(6): a, c, g, t, unknown or other
  modified_base (9)..(9): a, c, g, t, unknown or other
aayacnacnaayaayaayaay

SEQ ID NO: 2565 - DNA, 21 bp, Artificial Sequence
  Description of Artificial Sequence: Synthetic oligonucleotide
  modified_base (6)..(6): a, c, g, t, unknown or other
  modified_base (12)..(12): a, c, g, t, unknown or other
aayacnaayacnaayaayaay

SEQ ID NO: 2566 - DNA, 21 bp, Artificial Sequence
  Description of Artificial Sequence: Synthetic oligonucleotide
  modified_base (6)..(6): a, c, g, t, unknown or other
  modified_base (15)..(15): a, c, g, t, unknown or other
aayacnaayaayacnaayaay

SEQ ID NO: 2567 - DNA, 21 bp, Artificial Sequence
  Description of Artificial Sequence: Synthetic oligonucleotide
  modified_base (6)..(6): a, c, g, t, unknown or other
  modified_base (18)..(18): a, c, g, t, unknown or other
aayacnaayaayaayacnaay

SEQ ID NO: 2568 - DNA, 21 bp, Artificial Sequence
  Description of Artificial Sequence: Synthetic oligonucleotide
  modified_base (6)..(6): a, c, g, t, unknown or other
  modified_base (21)..(21): a, c, g, t, unknown or other
aayacnaayaayaayaayacn

SEQ ID NO: 2569 - DNA, 21 bp, Artificial Sequence
  Description of Artificial Sequence: Synthetic oligonucleotide
  modified_base (9)..(9): a, c, g, t, unknown or other
  modified_base (12)..(12): a, c, g, t, unknown or other
aayaayacnacnaayaayaay

SEQ ID NO: 2570 - DNA, 21 bp, Artificial Sequence
  Description of Artificial Sequence: Synthetic oligonucleotide
  modified_base (9)..(9): a, c, g, t, unknown or other
  modified_base (15)..(15): a, c, g, t, unknown or other
aayaayacnaayacnaayaay

SEQ ID NO: 2571 - DNA, 21 bp, Artificial Sequence
  Description of Artificial Sequence: Synthetic oligonucleotide
  modified_base (9)..(9): a, c, g, t, unknown or other
  modified_base (18)..(18): a, c, g, t, unknown or other
aayaayacnaayaayacnaay

SEQ ID NO: 2572 - DNA, 21 bp, Artificial Sequence
  Description of Artificial Sequence: Synthetic oligonucleotide
  modified_base (9)..(9): a, c, g, t, unknown or other
  modified_base (21)..(21): a, c, g, t, unknown or other
aayaayacnaayaayaayacn

SEQ ID NO: 2573 - DNA, 21 bp, Artificial Sequence
  Description of Artificial Sequence: Synthetic oligonucleotide
  modified_base (12)..(12): a, c, g, t, unknown or other
  modified_base (15)..(15): a, c, g, t, unknown or other
aayaayaayacnacnaayaay

SEQ ID NO: 2574 - DNA, 21 bp, Artificial Sequence
  Description of Artificial Sequence: Synthetic oligonucleotide
  modified_base (12)..(12): a, c, g, t, unknown or other
  modified_base (18)..(18): a, c, g, t, unknown or other
aayaayaayacnaayacnaay

SEQ ID NO: 2575 - DNA, 21 bp, Artificial Sequence
  Description of Artificial Sequence: Synthetic oligonucleotide
  modified_base (12)..(12): a, c, g, t, unknown or other
  modified_base (21)..(21): a, c, g, t, unknown or other
aayaayaayacnaayaayacn

SEQ ID NO: 2576 - DNA, 21 bp, Artificial Sequence
  Description of Artificial Sequence: Synthetic oligonucleotide
  modified_base (15)..(15): a, c, g, t, unknown or other
  modified_base (18)..(18): a, c, g, t, unknown or other
aayaayaayaayacnacnaay

SEQ ID NO: 2577 - DNA, 21 bp, Artificial Sequence
  Description of Artificial Sequence: Synthetic oligonucleotide
  modified_base (15)..(15): a, c, g, t, unknown or other
  modified_base (21)..(21): a, c, g, t, unknown or other
aayaayaayaayacnaayacn

SEQ ID NO: 2578 - DNA, 21 bp, Artificial Sequence
  Description of Artificial Sequence: Synthetic oligonucleotide
  modified_base (21)..(21): a, c, g, t, unknown or other
aayaayaayaayaayaayacn

SEQ ID NO: 2579 - DNA, 21 bp, Artificial Sequence
  Description of Artificial Sequence: Synthetic oligonucleotide
  modified_base (3)..(3): a, c, g, t, unknown or other
acnaayaayaayaayaayaay

SEQ ID NO: 2580 - DNA, 21 bp, Artificial Sequence
  Description of Artificial Sequence: Synthetic oligonucleotide
  modified_base (6)..(6): a, c, g, t, unknown or other
aayacnaayaayaayaayaay

SEQ ID NO: 2581 - DNA, 21 bp, Artificial Sequence
  Description of Artificial Sequence: Synthetic oligonucleotide
  modified_base (9)..(9): a, c, g, t, unknown or other
aayaayacnaayaayaayaay

SEQ ID NO: 2582 - DNA, 21 bp, Artificial Sequence
  Description of Artificial Sequence: Synthetic oligonucleotide
  modified_base (12)..(12): a, c, g, t, unknown or other
aayaayaayacnaayaayaay

SEQ ID NO: 2583 - DNA, 21 bp, Artificial Sequence
  Description of Artificial Sequence: Synthetic oligonucleotide
  modified_base (15)..(15): a, c, g, t, unknown or other
aayaayaayaayacnaayaay

SEQ ID NO: 2584 - DNA, 21 bp, Artificial Sequence
  Description of Artificial Sequence: Synthetic oligonucleotide
  modified_base (18)..(18): a, c, g, t, unknown or other
aayaayaayaayaayacnaay

SEQ ID NO: 2585 - DNA, 12 bp, Artificial Sequence
  Description of Artificial Sequence: Synthetic oligonucleotide
  modified_base (12)..(12): a, c, g, t, unknown or other
aayaayaaygcn

SEQ ID NO: 2586 - DNA, 12 bp, Artificial Sequence
  Description of Artificial Sequence: Synthetic oligonucleotide
  modified_base (3)..(3): a, c, g, t, unknown or other
gcnaayaayaay

SEQ ID NO: 2587 - DNA, 12 bp, Artificial Sequence
  Description of Artificial Sequence: Synthetic oligonucleotide
  modified_base (6)..(6): a, c, g, t, unknown or other
aaygcnaayaay

SEQ ID NO: 2588 - DNA, 12 bp, Artificial Sequence
  Description of Artificial Sequence: Synthetic oligonucleotide
  modified_base (9)..(9): a, c, g, t, unknown or other
aayaaygcnaay

SEQ ID NO: 2589 - DNA, 15 bp, Artificial Sequence
  Description of Artificial Sequence: Synthetic oligonucleotide
  modified_base (15)..(15): a, c, g, t, unknown or other
aayaayaayaaygcn

SEQ ID NO: 2590 - DNA, 15 bp, Artificial Sequence
  Description of Artificial Sequence: Synthetic oligonucleotide
  modified_base (3)..(3): a, c, g, t, unknown or other
gcnaayaayaayaay

SEQ ID NO: 2591 - DNA, 15 bp, Artificial Sequence
  Description of Artificial Sequence: Synthetic oligonucleotide
  modified_base (6)..(6): a, c, g, t, unknown or other
aaygcnaayaayaay

SEQ ID NO: 2592 - DNA, 15 bp, Artificial Sequence
  Description of Artificial Sequence: Synthetic oligonucleotide
  modified_base (9)..(9): a, c, g, t, unknown or other
aayaaygcnaayaay

SEQ ID NO: 2593 - DNA, 15 bp, Artificial Sequence
  Description of Artificial Sequence: Synthetic oligonucleotide
  modified_base (12)..(12): a, c, g, t, unknown or other
aayaayaaygcnaay

SEQ ID NO: 2594 - DNA, 15 bp, Artificial Sequence
  Description of Artificial Sequence: Synthetic oligonucleotide
  modified_base (12)..(12): a, c, g, t, unknown or other
  modified_base (15)..(15): a, c, g, t, unknown or other
aayaayaaygcngcn

SEQ ID NO: 2595 - DNA, 15 bp, Artificial Sequence
  Description of Artificial Sequence: Synthetic oligonucleotide
  modified_base (3)..(3): a, c, g, t, unknown or other
  modified_base (6)..(6): a, c, g, t, unknown or other
gcngcnaayaayaay

SEQ ID NO: 2596 - DNA, 15 bp, Artificial Sequence
  Description of Artificial Sequence: Synthetic oligonucleotide
  modified_base (3)..(3): a, c, g, t, unknown or other
  modified_base (9)..(9): a, c, g, t, unknown or other
gcnaaygcnaayaay

SEQ ID NO: 2597 - DNA, 15 bp, Artificial Sequence
  Description of Artificial Sequence: Synthetic oligonucleotide
  modified_base (3)..(3): a, c, g, t, unknown or other
  modified_base (12)..(12): a, c, g, t, unknown or other
gcnaayaaygcnaay

SEQ ID NO: 2598 - DNA, 15 bp, Artificial Sequence
  Description of Artificial Sequence: Synthetic oligonucleotide
  modified_base (3)..(3): a, c, g, t, unknown or other
  modified_base (15)..(15): a, c, g, t, unknown or other
gcnaayaayaaygcn

SEQ ID NO: 2599 - DNA, 15 bp, Artificial Sequence
  Description of Artificial Sequence: Synthetic oligonucleotide
  modified_base (6)..(6): a, c, g, t, unknown or other
  modified_base (9)..(9): a, c, g, t, unknown or other
aaygcngcnaayaay

SEQ ID NO: 2600 - DNA, 15 bp, Artificial Sequence
  Description of Artificial Sequence: Synthetic oligonucleotide
  modified_base (6)..(6): a, c, g, t, unknown or other
  modified_base (12)..(12): a, c, g, t, unknown or other
aaygcnaaygcnaay

SEQ ID NO: 2601 - DNA, 15 bp, Artificial Sequence
  Description of Artificial Sequence: Synthetic oligonucleotide
  modified_base (6)..(6): a, c, g, t, unknown or other
  modified_base (15)..(15): a, c, g, t, unknown or other
aaygcnaayaaygcn

SEQ ID NO: 2602 - DNA, 15 bp, Artificial Sequence
  Description of Artificial Sequence: Synthetic oligonucleotide
  modified_base (9)..(9): a, c, g, t, unknown or other
  modified_base (12)..(12): a, c, g, t, unknown or other
aayaaygcngcnaay

SEQ ID NO: 2603 - DNA, 15 bp, Artificial Sequence
  Description of Artificial Sequence: Synthetic oligonucleotide
  modified_base (9)..(9): a, c, g, t, unknown or other
  modified_base (15)..(15): a, c, g, t, unknown or other
aayaaygcnaaygcn

SEQ ID NO: 2604 - DNA, 18 bp, Artificial Sequence
  Description of Artificial Sequence: Synthetic oligonucleotide
  modified_base (18)..(18): a, c, g, t, unknown or other
aayaayaayaayaaygcn

SEQ ID NO: 2605 - DNA, 18 bp, Artificial Sequence
  Description of Artificial Sequence: Synthetic oligonucleotide
  modified_base (3)..(3): a, c, g, t, unknown or other
gcnaayaayaayaayaay

SEQ ID NO: 2606 - DNA, 18 bp, Artificial Sequence
  Description of Artificial Sequence: Synthetic oligonucleotide
  modified_base (6)..(6): a, c, g, t, unknown or other
aaygcnaayaayaayaay

SEQ ID NO: 2607 - DNA, 18 bp, Artificial Sequence
  Description of Artificial Sequence: Synthetic oligonucleotide
  modified_base (9)..(9): a, c, g, t, unknown or other
aayaaygcnaayaayaay

SEQ ID NO: 2608 - DNA, 18 bp, Artificial Sequence
  Description of Artificial Sequence: Synthetic oligonucleotide
  modified_base (12)..(12): a, c, g, t, unknown or other
aayaayaaygcnaayaay

SEQ ID NO: 2609 - DNA, 18 bp, Artificial Sequence
  Description of Artificial Sequence: Synthetic oligonucleotide
  modified_base (15)..(15): a, c, g, t, unknown or other
aayaayaayaaygcnaay

SEQ ID NO: 2610 - DNA, 18 bp, Artificial Sequence
  Description of Artificial Sequence: Synthetic oligonucleotide
  modified_base (15)..(15): a, c, g, t, unknown or other
  modified_base (18)..(18): a, c, g, t, unknown or other
aayaayaayaaygcngcn

SEQ ID NO: 2611 - DNA, 18 bp, Artificial Sequence
  Description of Artificial Sequence: Synthetic oligonucleotide
  modified_base (3)..(3): a, c, g, t, unknown or other
  modified_base (6)..(6): a, c, g, t, unknown or other
gcngcnaayaayaayaay

SEQ ID NO: 2612 - DNA, 18 bp, Artificial Sequence
  Description of Artificial Sequence: Synthetic oligonucleotide
  modified_base (3)..(3): a, c, g, t, unknown or other
  modified_base (9)..(9): a, c, g, t, unknown or other
gcnaaygcnaayaayaay

SEQ ID NO: 2613 - DNA, 18 bp, Artificial Sequence
  Description of Artificial Sequence: Synthetic oligonucleotide
  modified_base (3)..(3): a, c, g, t, unknown or other
  modified_base (12)..(12): a, c, g, t, unknown or other
gcnaayaaygcnaayaay

SEQ ID NO: 2614 - DNA, 18 bp, Artificial Sequence
  Description of Artificial Sequence: Synthetic oligonucleotide
  modified_base (3)..(3): a, c, g, t, unknown or other
  modified_base (15)..(15): a, c, g, t, unknown or other
gcnaayaayaaygcnaay

SEQ ID NO: 2615 - DNA, 18 bp, Artificial Sequence
  Description of Artificial Sequence: Synthetic oligonucleotide
  modified_base (3)..(3): a, c, g, t, unknown or other
  modified_base (18)..(18): a, c, g, t, unknown or other
gcnaayaayaayaaygcn

SEQ ID NO: 2616 - DNA, 18 bp, Artificial Sequence
  Description of Artificial Sequence: Synthetic oligonucleotide
  modified_base (6)..(6): a, c, g, t, unknown or other
  modified_base (9)..(9): a, c, g, t, unknown or other
aaygcngcnaayaayaay

SEQ ID NO: 2617 - DNA, 18 bp, Artificial Sequence
  Description of Artificial Sequence: Synthetic oligonucleotide
  modified_base (6)..(6): a, c, g, t, unknown or other
  modified_base (12)..(12): a, c, g, t, unknown or other
aaygcnaaygcnaayaay

SEQ ID NO: 2618 - DNA, 18 bp, Artificial Sequence
  Description of Artificial Sequence: Synthetic oligonucleotide
  modified_base (6)..(6): a, c, g, t, unknown or other
  modified_base (15)..(15): a, c, g, t, unknown or other
aaygcnaayaaygcnaay

SEQ ID NO: 2619 - DNA, 18 bp, Artificial Sequence
  Description of Artificial Sequence: Synthetic oligonucleotide
  modified_base (6)..(6): a, c, g, t, unknown or other
  modified_base (18)..(18): a, c, g, t, unknown or other
aaygcnaayaayaaygcn

SEQ ID NO: 2620 - DNA, 18 bp, Artificial Sequence
  Description of Artificial Sequence: Synthetic oligonucleotide
  modified_base (9)..(9): a, c, g, t, unknown or other
  modified_base (12)..(12): a, c, g, t, unknown or other
aayaaygcngcnaayaay

SEQ ID NO: 2621 - DNA, 18 bp, Artificial Sequence
  Description of Artificial Sequence: Synthetic oligonucleotide
  modified_base (9)..(9): a, c, g, t, unknown or other
  modified_base (15)..(15): a, c, g, t, unknown or other
aayaaygcnaaygcnaay

SEQ ID NO: 2622 - DNA, 18 bp, Artificial Sequence
  Description of Artificial Sequence: Synthetic oligonucleotide
  modified_base (9)..(9): a, c, g, t, unknown or other
  modified_base (18)..(18): a, c, g, t, unknown or other
aayaaygcnaayaaygcn

SEQ ID NO: 2623 - DNA, 18 bp, Artificial Sequence
  Description of Artificial Sequence: Synthetic oligonucleotide
  modified_base (12)..(12): a, c, g, t, unknown or other
  modified_base (15)..(15): a, c, g, t, unknown or other
aayaayaaygcngcnaay

SEQ ID NO: 2624 - DNA, 18 bp, Artificial Sequence
  Description of Artificial Sequence: Synthetic oligonucleotide
  modified_base (12)..(12): a, c, g, t, unknown or other
  modified_base (18)..(18): a, c, g, t, unknown or other
aayaayaaygcnaaygcn

SEQ ID NO: 2625 - DNA, 21 bp, Artificial Sequence
  Description of Artificial Sequence: Synthetic oligonucleotide
  modified_base (15)..(15): a, c, g, t, unknown or other
  modified_base (18)..(18): a, c, g, t, unknown or other
  modified_base (21)..(21): a, c, g, t, unknown or other
aayaayaayaaygcngcngcn

SEQ ID NO: 2626 - DNA, 21 bp, Artificial Sequence
  Description of Artificial Sequence: Synthetic oligonucleotide
  modified_base (3)..(3): a, c, g, t, unknown or other
  modified_base (6)..(6): a, c, g, t, unknown or other
  modified_base (9)..(9): a, c, g, t, unknown or other
gcngcngcnaayaayaayaay

SEQ ID NO: 2627 - DNA, 21 bp, Artificial Sequence
  Description of Artificial Sequence: Synthetic oligonucleotide
  modified_base (3)..(3): a, c, g, t, unknown or other
  modified_base (9)..(9): a, c, g, t, unknown or other
  modified_base (12)..(12): a, c, g, t, unknown or other
gcnaaygcngcnaayaayaay

SEQ ID NO: 2628 - DNA, 21 bp, Artificial Sequence
  Description of Artificial Sequence: Synthetic oligonucleotide
  modified_base (3)..(3): a, c, g, t, unknown or other
  modified_base (9)..(9): a, c, g, t, unknown or other
  modified_base (15)..(15): a, c, g, t, unknown or other
gcnaaygcnaaygcnaayaay

SEQ ID NO: 2629 - DNA, 21 bp, Artificial Sequence
  Description of Artificial Sequence: Synthetic oligonucleotide
  modified_base (3)..(3): a, c, g, t, unknown or other
  modified_base (9)..(9): a, c, g, t, unknown or other
  modified_base (18)..(18): a, c, g, t, unknown or other
gcnaaygcnaayaaygcnaay

SEQ ID NO: 2630 - DNA, 21 bp, Artificial Sequence
  Description of Artificial Sequence: Synthetic oligonucleotide
  modified_base (3)..(3): a, c, g, t, unknown or other
  modified_base (9)..(9): a, c, g, t, unknown or other
  modified_base (21)..(21): a, c, g, t, unknown or other
gcnaaygcnaayaayaaygcn

SEQ ID NO: 2631 - DNA, 21 bp, Artificial Sequence
  Description of Artificial Sequence: Synthetic oligonucleotide
  modified_base (3)..(3): a, c, g, t, unknown or other
  modified_base (12)..(12): a, c, g, t, unknown or other
  modified_base (15)..(15): a, c, g, t, unknown or other
gcnaayaaygcngcnaayaay

SEQ ID NO: 2632 - DNA, 21 bp, Artificial Sequence
  Description of Artificial Sequence: Synthetic oligonucleotide
  modified_base (3)..(3): a, c, g, t, unknown or other
  modified_base (12)..(12): a, c, g, t, unknown or other
  modified_base (18)..(18): a, c, g, t, unknown or other
gcnaayaaygcnaaygcnaay

SEQ ID NO: 2633 - DNA, 21 bp, Artificial Sequence
  Description of Artificial Sequence: Synthetic oligonucleotide
  modified_base (3)..(3): a, c, g, t, unknown or other
  modified_base (12)..(12): a, c, g, t, unknown or other
  modified_base (21)..(21): a, c, g, t, unknown or other
gcnaayaaygcnaayaaygcn

SEQ ID NO: 2634 - DNA, 21 bp, Artificial Sequence
  Description of Artificial Sequence: Synthetic oligonucleotide
  modified_base (3)..(3): a, c, g, t, unknown or other
  modified_base (15)..(15): a, c, g, t, unknown or other
  modified_base (21)..(21): a, c, g, t, unknown or other
gcnaayaayaaygcnaaygcn

SEQ ID NO: 2635 - DNA, 21 bp, Artificial Sequence
  Description of Artificial Sequence: Synthetic oligonucleotide
  modified_base (3)..(3): a, c, g, t, unknown or other
  modified_base (15)..(15): a, c, g, t, unknown or other
  modified_base (18)..(18): a, c, g, t, unknown or other
gcnaayaayaaygcngcnaay

SEQ ID NO: 2636 - DNA, 21 bp, Artificial Sequence
  Description of Artificial Sequence: Synthetic oligonucleotide
  modified_base (3)..(3): a, c, g, t, unknown or other
  modified_base (18)..(18): a, c, g, t, unknown or other
  modified_base (21)..(21): a, c, g, t, unknown or other
gcnaayaayaayaaygcngcn

SEQ ID NO: 2637 - DNA, 21 bp, Artificial Sequence
  Description of Artificial Sequence: Synthetic oligonucleotide
  modified_base (3)..(3): a, c, g, t, unknown or other
  modified_base (6)..(6): a, c, g, t, unknown or other
  modified_base (12)..(12): a, c, g, t, unknown or other
gcngcnaaygcnaayaayaay

SEQ ID NO: 2638 - DNA, 21 bp, Artificial Sequence
  Description of Artificial Sequence: Synthetic oligonucleotide
  modified_base (3)..(3): a, c, g, t, unknown or other
  modified_base (6)..(6): a, c, g, t, unknown or other
  modified_base (15)..(15): a, c, g, t, unknown or other
gcngcnaayaaygcnaayaay

SEQ ID NO: 2639 - DNA, 21 bp, Artificial Sequence
  Description of Artificial Sequence: Synthetic oligonucleotide
  modified_base (3)..(3): a, c, g, t, unknown or other
  modified_base (6)..(6): a, c, g, t, unknown or other
  modified_base (18)..(18): a, c, g, t, unknown or other
gcngcnaayaayaaygcnaay

SEQ ID NO: 2640 - DNA, 21 bp, Artificial Sequence
  Description of Artificial Sequence: Synthetic oligonucleotide
  modified_base (3)..(3): a, c, g, t, unknown or other
  modified_base (6)..(6): a, c, g, t, unknown or other
  modified_base (21)..(21): a, c, g, t, unknown or other
gcngcnaayaayaayaaygcn

SEQ ID NO: 2641 - DNA, 21 bp, Artificial Sequence
  Description of Artificial Sequence: Synthetic oligonucleotide
  modified_base (6)..(6): a, c, g, t, unknown or other
  modified_base (9)..(9): a, c, g, t, unknown or other
  modified_base (12)..(12): a, c, g, t, unknown or other
aaygcngcngcnaayaayaay

SEQ ID NO: 2642 - DNA, 21 bp, Artificial Sequence
  Description of Artificial Sequence: Synthetic oligonucleotide
  modified_base (6)..(6): a, c, g, t, unknown or other
  modified_base (9)..(9): a, c, g, t, unknown or other
  modified_base (15)..(15): a, c, g, t, unknown or other
aaygcngcnaaygcnaayaay

SEQ ID NO: 2643 - DNA, 21 bp, Artificial Sequence
  Description of Artificial Sequence: Synthetic oligonucleotide
  modified_base (6)..(6): a, c, g, t, unknown or other
  modified_base (9)..(9): a, c, g, t, unknown or other
  modified_base (18)..(18): a, c, g, t, unknown or other
aaygcngcnaayaaygcnaay

SEQ ID NO: 2644 - DNA, 21 bp, Artificial Sequence
  Description of Artificial Sequence: Synthetic oligonucleotide
  modified_base (6)..(6): a, c, g, t, unknown or other
  modified_base (9)..(9): a, c, g, t, unknown or other
  modified_base (21)..(21): a, c, g, t, unknown or other
aaygcngcnaayaayaaygcn

SEQ ID NO: 2645 - DNA, 21 bp, Artificial Sequence
  Description of Artificial Sequence: Synthetic oligonucleotide
  modified_base (6)..(6): a, c, g, t, unknown or other
  modified_base (12)..(12): a, c, g, t, unknown or other
  modified_base (15)..(15): a, c, g, t, unknown or other
aaygcnaaygcngcnaayaay

SEQ ID NO: 2646 - DNA, 21 bp, Artificial Sequence
  Description of Artificial Sequence: Synthetic oligonucleotide
  modified_base (6)..(6): a, c, g, t, unknown or other
  modified_base (15)..(15): a, c, g, t, unknown or other
  modified_base (18)..(18): a, c, g, t, unknown or other
aaygcnaayaaygcngcnaay

SEQ ID NO: 2647 - DNA, 21 bp, Artificial Sequence
  Description of Artificial Sequence: Synthetic oligonucleotide
  modified_base (6)..(6): a, c, g, t, unknown or other
  modified_base (18)..(18): a, c, g, t, unknown or other
  modified_base (21)..(21): a, c, g, t, unknown or other
aaygcnaayaayaaygcngcn

SEQ ID NO: 2648 - DNA, 21 bp, Artificial Sequence
  Description of Artificial Sequence: Synthetic oligonucleotide
  modified_base (6)..(6): a, c, g, t, unknown or other
  modified_base (12)..(12): a, c, g, t, unknown or other
  modified_base (18)..(18): a, c, g, t, unknown or other
aaygcnaaygcnaaygcnaay

SEQ ID NO: 2649 - DNA, 21 bp, Artificial Sequence
  Description of Artificial Sequence: Synthetic oligonucleotide
  modified_base (6)..(6): a, c, g, t, unknown or other
  modified_base (12)..(12): a, c, g, t, unknown or other
  modified_base (21)..(21): a, c, g, t, unknown or other
aaygcnaaygcnaayaaygcn

SEQ ID NO: 2650 - DNA, 21 bp, Artificial Sequence
  Description of Artificial Sequence: Synthetic oligonucleotide
  modified_base (6)..(6): a, c, g, t, unknown or other
  modified_base (15)..(15): a, c, g, t, unknown or other
  modified_base (21)..(21): a, c, g, t, unknown or other
aaygcnaayaaygcnaaygcn

SEQ ID NO: 2651 - DNA, 21 bp, Artificial Sequence
  Description of Artificial Sequence: Synthetic oligonucleotide
  modified_base (9)..(9): a, c, g, t, unknown or other
  modified_base (12)..(12): a, c, g, t, unknown or other
  modified_base (15)..(15): a, c, g, t, unknown or other
aayaaygcngcngcnaayaay

SEQ ID NO: 2652 - DNA, 21 bp, Artificial Sequence
  Description of Artificial Sequence: Synthetic oligonucleotide
  modified_base (9)..(9): a, c, g, t, unknown or other
  modified_base (12)..(12): a, c, g, t, unknown or other
  modified_base (18)..(18): a, c, g, t, unknown or other
aayaaygcngcnaaygcnaay

SEQ ID NO: 2653 - DNA, 21 bp, Artificial Sequence
  Description of Artificial Sequence: Synthetic oligonucleotide
  modified_base (9)..(9): a, c, g, t, unknown or other
  modified_base (12)..(12): a, c, g, t, unknown or other
  modified_base (21)..(21): a, c, g, t, unknown or other
aayaaygcngcnaayaaygcn

SEQ ID NO: 2654 - DNA, 21 bp, Artificial Sequence
  Description of Artificial Sequence: Synthetic oligonucleotide
  modified_base (9)..(9): a, c, g, t, unknown or other
  modified_base (15)..(15): a, c, g, t, unknown or other
  modified_base (18)..(18): a, c, g, t, unknown or other
aayaaygcnaaygcngcnaay

SEQ ID NO: 2655 - DNA, 21 bp, Artificial Sequence
  Description of Artificial Sequence: Synthetic oligonucleotide
  modified_base (9)..(9): a, c, g, t, unknown or other
  modified_base (15)..(15): a, c, g, t, unknown or other
  modified_base (21)..(21): a, c, g, t, unknown or other
aayaaygcnaaygcnaaygcn

SEQ ID NO: 2656 - DNA, 21 bp, Artificial Sequence
  Description of Artificial Sequence: Synthetic oligonucleotide
  modified_base (9)..(9): a, c, g, t, unknown or other
  modified_base (18)..(18): a, c, g, t, unknown or other
  modified_base (21)..(21): a, c, g, t, unknown or other
aayaaygcnaayaaygcngcn

SEQ ID NO: 2657 - DNA, 21 bp, Artificial Sequence
  Description of Artificial Sequence: Synthetic oligonucleotide
  modified_base (12)..(12): a, c, g, t, unknown or other
  modified_base (15)..(15): a, c, g, t, unknown or other
  modified_base (18)..(18): a, c, g, t, unknown or other
aayaayaaygcngcngcnaay

SEQ ID NO: 2658 - DNA, 21 bp, Artificial Sequence
  Description of Artificial Sequence: Synthetic oligonucleotide
  modified_base (12)..(12): a, c, g, t, unknown or other
  modified_base (15)..(15): a, c, g, t, unknown or other
  modified_base (21)..(21): a, c, g, t, unknown or other
aayaayaaygcngcnaaygcn

SEQ ID NO: 2659 - DNA, 21 bp, Artificial Sequence
  Description of Artificial Sequence: Synthetic oligonucleotide
  modified_base (12)..(12): a, c, g, t, unknown or other
  modified_base (18)..(18): a, c, g, t, unknown or other
  modified_base (21)..(21): a, c, g, t, unknown or other
aayaayaaygcnaaygcngcn

SEQ ID NO: 2660 - DNA, 21 bp, Artificial Sequence
  Description of Artificial Sequence: Synthetic oligonucleotide
  modified_base (18)..(18): a, c, g, t, unknown or other
  modified_base (21)..(21): a, c, g, t, unknown or other
aayaayaayaayaaygcngcn

SEQ ID NO: 2661 - DNA, 21 bp, Artificial Sequence
  Description of Artificial Sequence: Synthetic oligonucleotide
  modified_base (3)..(3): a, c, g, t, unknown or other
  modified_base (6)..(6): a, c, g, t, unknown or other
gcngcnaayaayaayaayaay

SEQ ID NO: 2662 - DNA, 21 bp, Artificial Sequence
  Description of Artificial Sequence: Synthetic oligonucleotide
  modified_base (3)..(3): a, c, g, t, unknown or other
  modified_base (9)..(9): a, c, g, t, unknown or other
gcnaaygcnaayaayaayaay

SEQ ID NO: 2663 - DNA, 21 bp, Artificial Sequence
  Description of Artificial Sequence: Synthetic oligonucleotide
  modified_base (3)..(3): a, c, g, t, unknown or other
  modified_base (12)..(12): a, c, g, t, unknown or other
gcnaayaaygcnaayaayaay

SEQ ID NO: 2664 - DNA, 21 bp, Artificial Sequence
  Description of Artificial Sequence: Synthetic oligonucleotide
  modified_base (3)..(3): a, c, g, t, unknown or other
  modified_base (15)..(15): a, c, g, t, unknown or other
gcnaayaayaaygcnaayaay

SEQ ID NO: 2665 - DNA, 21 bp, Artificial Sequence
  Description of Artificial Sequence: Synthetic oligonucleotide
  modified_base (3)..(3): a, c, g, t, unknown or other
  modified_base (18)..(18): a, c, g, t, unknown or other
gcnaayaayaayaaygcnaay

SEQ ID NO: 2666 - DNA, 21 bp, Artificial Sequence
  Description of Artificial Sequence: Synthetic oligonucleotide
  modified_base (3)..(3): a, c, g, t, unknown or other
  modified_base (21)..(21): a, c, g, t, unknown or other
gcnaayaayaayaayaaygcn

SEQ ID NO: 2667 - DNA, 21 bp, Artificial Sequence
  Description of Artificial Sequence: Synthetic oligonucleotide
  modified_base (6)..(6): a, c, g, t, unknown or other
  modified_base (9)..(9): a, c, g, t, unknown or other
aaygcngcnaayaayaayaay

SEQ ID NO: 2668 - DNA, 21 bp, Artificial Sequence
  Description of Artificial Sequence: Synthetic oligonucleotide
  modified_base (6)..(6): a, c, g, t, unknown or other
  modified_base (12)..(12): a, c, g, t, unknown or other
aaygcnaaygcnaayaayaay

SEQ ID NO: 2669 - DNA, 21 bp, Artificial Sequence
  Description of Artificial Sequence: Synthetic oligonucleotide
  modified_base (6)..(6): a, c, g, t, unknown or other
  modified_base (15)..(15): a, c, g, t, unknown or other
aaygcnaayaaygcnaayaay

SEQ ID NO: 2670 - DNA, 21 bp, Artificial Sequence
  Description of Artificial Sequence: Synthetic oligonucleotide
  modified_base (6)..(6): a, c, g, t, unknown or other
  modified_base (18)..(18): a, c, g, t, unknown or other
aaygcnaayaayaaygcnaay

SEQ ID NO: 2671 - DNA, 21 bp, Artificial Sequence
  Description of Artificial Sequence: Synthetic oligonucleotide
  modified_base (6)..(6): a, c, g, t, unknown or other
  modified_base (21)..(21): a, c, g, t, unknown or other
aaygcnaayaayaayaaygcn

SEQ ID NO: 2672 - DNA, 21 bp, Artificial Sequence
  Description of Artificial Sequence: Synthetic oligonucleotide
  modified_base (9)..(9): a, c, g, t, unknown or other
  modified_base (12)..(12): a, c, g, t, unknown or other
aayaaygcngcnaayaayaay

SEQ ID NO: 2673 - DNA, 21 bp, Artificial Sequence
  Description of Artificial Sequence: Synthetic oligonucleotide
  modified_base (9)..(9): a, c, g, t, unknown or other
  modified_base (15)..(15): a, c, g, t, unknown or other
aayaaygcnaaygcnaayaay

SEQ ID NO: 2674 - DNA, 21 bp, Artificial Sequence
  Description of Artificial Sequence: Synthetic oligonucleotide
  modified_base (9)..(9): a, c, g, t, unknown or other
  modified_base (18)..(18): a, c, g, t, unknown or other
aayaaygcnaayaaygcnaay

SEQ ID NO: 2675 - DNA, 21 bp, Artificial Sequence
  Description of Artificial Sequence: Synthetic oligonucleotide
  modified_base (9)..(9): a, c, g, t, unknown or other
  modified_base (21)..(21): a, c, g, t, unknown or other
aayaaygcnaayaayaaygcn

SEQ ID NO: 2676 - DNA, 21 bp, Artificial Sequence
  Description of Artificial Sequence: Synthetic oligonucleotide
  modified_base (12)..(12): a, c, g, t, unknown or other
  modified_base (15)..(15): a, c, g, t, unknown or other
aayaayaaygcngcnaayaay

SEQ ID NO: 2677 - DNA, 21 bp, Artificial Sequence
  Description of Artificial Sequence: Synthetic oligonucleotide
  modified_base (12)..(12): a, c, g, t, unknown or other
  modified_base (18)..(18): a, c, g, t, unknown or other
aayaayaaygcnaaygcnaay

SEQ ID NO: 2678 - DNA, 21 bp, Artificial Sequence
  Description of Artificial Sequence: Synthetic oligonucleotide
  modified_base (12)..(12): a, c, g, t, unknown or other
  modified_base (21)..(21): a, c, g, t, unknown or other
aayaayaaygcnaayaaygcn

SEQ ID NO: 2679 - DNA, 21 bp, Artificial Sequence
  Description of Artificial Sequence: Synthetic oligonucleotide
  modified_base (15)..(15): a, c, g, t, unknown or other
  modified_base (18)..(18): a, c, g, t, unknown or other
aayaayaayaaygcngcnaay

SEQ ID NO: 2680 - DNA, 21 bp, Artificial Sequence
  Description of Artificial Sequence: Synthetic oligonucleotide
  modified_base (15)..(15): a, c, g, t, unknown or other
  modified_base (21)..(21): a, c, g, t, unknown or other
aayaayaayaaygcnaaygcn

SEQ ID NO: 2681 - DNA, 21 bp, Artificial Sequence
  Description of Artificial Sequence: Synthetic oligonucleotide
  modified_base (21)..(21): a, c, g, t, unknown or other
aayaayaayaayaayaaygcn

SEQ ID NO: 2682 - DNA, 21 bp, Artificial Sequence
  Description of Artificial Sequence: Synthetic oligonucleotide
  modified_base (3)..(3): a, c, g, t, unknown or other
gcnaayaayaayaayaayaay

SEQ ID NO: 2683 - DNA, 21 bp, Artificial Sequence
  Description of Artificial Sequence: Synthetic oligonucleotide
  modified_base (6)..(6): a, c, g, t, unknown or other
aaygcnaayaayaayaayaay

SEQ ID NO: 2684 - DNA, 21 bp, Artificial Sequence
  Description of Artificial Sequence: Synthetic oligonucleotide
  modified_base (9)..(9): a, c, g, t, unknown or other
aayaaygcnaayaayaayaay

SEQ ID NO: 2685 - DNA, 21 bp, Artificial Sequence
  Description of Artificial Sequence: Synthetic oligonucleotide
  modified_base (12)..(12): a, c, g, t, unknown or other
aayaayaaygcnaayaayaay

SEQ ID NO: 2686 - DNA, 21 bp, Artificial Sequence
  Description of Artificial Sequence: Synthetic oligonucleotide
  modified_base (15)..(15): a, c, g, t, unknown or other
aayaayaayaaygcnaayaay

SEQ ID NO: 2687 - DNA, 21 bp, Artificial Sequence
  Description of Artificial Sequence: Synthetic oligonucleotide
  modified_base (18)..(18): a, c, g, t, unknown or other
aayaayaayaayaaygcnaay

SEQ ID NO: 2688 - DNA, 12 bp, Artificial Sequence
  Description of Artificial Sequence: Synthetic oligonucleotide
aayaayaayagy

SEQ ID NO: 2689 - DNA, 12 bp, Artificial Sequence
  Description of Artificial Sequence: Synthetic oligonucleotide
agyaayaayaay

SEQ ID NO: 2690 - DNA, 12 bp, Artificial Sequence
  Description of Artificial Sequence: Synthetic oligonucleotide
aayagyaayaay

SEQ ID NO: 2691 - DNA, 12 bp, Artificial Sequence
  Description of Artificial Sequence: Synthetic oligonucleotide
aayaayagyaay

SEQ ID NO: 2692 - DNA, 15 bp, Artificial Sequence
  Description of Artificial Sequence: Synthetic oligonucleotide
aayaayaayaayagy

SEQ ID NO: 2693 - DNA, 15 bp, Artificial Sequence
  Description of Artificial Sequence: Synthetic oligonucleotide
agyaayaayaayaay

SEQ ID NO: 2694 - DNA, 15 bp, Artificial Sequence
  Description of Artificial Sequence: Synthetic oligonucleotide
aayagyaayaayaay

SEQ ID NO: 2695 - DNA, 15 bp, Artificial Sequence
  Description of Artificial Sequence: Synthetic oligonucleotide
aayaayagyaayaay

SEQ ID NO: 2696 - DNA, 15 bp, Artificial Sequence
  Description of Artificial Sequence: Synthetic oligonucleotide
aayaayaayagyaay

SEQ ID NO: 2697 - DNA, 15 bp, Artificial Sequence
  Description of Artificial Sequence: Synthetic oligonucleotide
aayaayaayagyagy

SEQ ID NO: 2698 - DNA, 15 bp, Artificial Sequence
  Description of Artificial Sequence: Synthetic oligonucleotide
agyagyaayaayaay

SEQ ID NO: 2699 - DNA, 15 bp, Artificial Sequence
  Description of Artificial Sequence: Synthetic oligonucleotide
agyaayagyaayaay

SEQ ID NO: 2700 - DNA, 15 bp, Artificial Sequence
  Description of Artificial Sequence: Synthetic oligonucleotide
agyaayaayagyaay

SEQ ID NO: 2701 - DNA, 15 bp, Artificial Sequence
  Description of Artificial Sequence: Synthetic oligonucleotide
agyaayaayaayagy

SEQ ID NO: 2702 - DNA, 15 bp, Artificial Sequence
  Description of Artificial Sequence: Synthetic oligonucleotide
aayagyagyaayaay

SEQ ID NO: 2703 - DNA, 15 bp, Artificial Sequence
  Description of Artificial Sequence: Synthetic oligonucleotide
aayagyaayagyaay

SEQ ID NO: 2704 - DNA, 15 bp, Artificial Sequence
  Description of Artificial Sequence: Synthetic oligonucleotide
aayagyaayaayagy

SEQ ID NO: 2705 - DNA, 15 bp, Artificial Sequence
  Description of Artificial Sequence: Synthetic oligonucleotide
aayaayagyagyaay

SEQ ID NO: 2706 - DNA, 15 bp, Artificial Sequence
  Description of Artificial Sequence: Synthetic oligonucleotide
aayaayagyaayagy

SEQ ID NO: 2707 - DNA, 18 bp, Artificial Sequence
  Description of Artificial Sequence: Synthetic oligonucleotide
aayaayaayaayaayagy

SEQ ID NO: 2708 - DNA, 18 bp, Artificial Sequence
  Description of Artificial Sequence: Synthetic oligonucleotide
agyaayaayaayaayaay

SEQ ID NO: 2709 - DNA, 18 bp, Artificial Sequence
  Description of Artificial Sequence: Synthetic oligonucleotide
aayagyaayaayaayaay

SEQ ID NO: 2710 - DNA, 18 bp, Artificial Sequence
  Description of Artificial Sequence: Synthetic oligonucleotide
aayaayagyaayaayaay

SEQ ID NO: 2711 - DNA, 18 bp, Artificial Sequence
  Description of Artificial Sequence: Synthetic oligonucleotide
aayaayaayagyaayaay

SEQ ID NO: 2712 - DNA, 18 bp, Artificial Sequence
  Description of Artificial Sequence: Synthetic oligonucleotide
aayaayaayaayagyaay

SEQ ID NO: 2713 - DNA, 18 bp, Artificial Sequence
  Description of Artificial Sequence: Synthetic oligonucleotide
aayaayaayaayagyagy

SEQ ID NO: 2714 - DNA, 18 bp, Artificial Sequence
  Description of Artificial Sequence: Synthetic oligonucleotide
agyagyaayaayaayaay

SEQ ID NO: 2715 - DNA, 18 bp, Artificial Sequence
  Description of Artificial Sequence: Synthetic oligonucleotide
agyaayagyaayaayaay

SEQ ID NO: 2716 - DNA, 18 bp, Artificial Sequence
  Description of Artificial Sequence: Synthetic oligonucleotide
agyaayaayagyaayaay

SEQ ID NO: 2717 - DNA, 18 bp, Artificial Sequence
  Description of Artificial Sequence: Synthetic oligonucleotide
agyaayaayaayagyaay

SEQ ID NO: 2718 - DNA, 18 bp, Artificial Sequence
  Description of Artificial Sequence: Synthetic oligonucleotide
agyaayaayaayaayagy

SEQ ID NO: 2719 - DNA, 18 bp, Artificial Sequence
  Description of Artificial Sequence: Synthetic oligonucleotide
aayagyagyaayaayaay

SEQ ID NO: 2720 - DNA, 18 bp, Artificial Sequence
  Description of Artificial Sequence: Synthetic oligonucleotide
aayagyaayagyaayaay

SEQ ID NO: 2721 - DNA, 18 bp, Artificial Sequence
  Description of Artificial Sequence: Synthetic oligonucleotide
aayagyaayaayagyaay

SEQ ID NO: 2722 - DNA, 18 bp, Artificial Sequence
  Description of Artificial Sequence: Synthetic oligonucleotide
aayagyaayaayaayagy

SEQ ID NO: 2723 - DNA, 18 bp, Artificial Sequence
  Description of Artificial Sequence: Synthetic oligonucleotide
aayaayagyagyaayaay

SEQ ID NO: 2724 - DNA, 18 bp, Artificial Sequence
  Description of Artificial Sequence: Synthetic oligonucleotide
aayaayagyaayagyaay

SEQ ID NO: 2725 - DNA, 18 bp, Artificial Sequence
  Description of Artificial Sequence: Synthetic oligonucleotide
aayaayagyaayaayagy

SEQ ID NO: 2726 - DNA, 18 bp, Artificial Sequence
  Description of Artificial Sequence: Synthetic oligonucleotide
aayaayaayagyagyaay

SEQ ID NO: 2727 - DNA, 18 bp, Artificial Sequence
  Description of Artificial Sequence: Synthetic oligonucleotide
aayaayaayagyaayagy

SEQ ID NO: 2728 - DNA, 21 bp, Artificial Sequence
  Description of Artificial Sequence: Synthetic oligonucleotide
aayaayaayaayagyagyagy

SEQ ID NO: 2729 - DNA, 21 bp, Artificial Sequence
  Description of Artificial Sequence: Synthetic oligonucleotide
agyagyagyaayaayaayaay

SEQ ID NO: 2730 - DNA, 21 bp, Artificial Sequence
  Description of Artificial Sequence: Synthetic oligonucleotide
agyaayagyagyaayaayaay

SEQ ID NO: 2731 - DNA, 21 bp, Artificial Sequence
  Description of Artificial Sequence: Synthetic oligonucleotide
agyaayagyaayagyaayaay

SEQ ID NO: 2732 - DNA, 21 bp, Artificial Sequence
  Description of Artificial Sequence: Synthetic oligonucleotide
agyaayagyaayaayagyaay

SEQ ID NO: 2733 - DNA, 21 bp, Artificial Sequence
  Description of Artificial Sequence: Synthetic oligonucleotide
agyaayagyaayaayaayagy

SEQ ID NO: 2734 - DNA, 21 bp, Artificial Sequence
  Description of Artificial Sequence: Synthetic oligonucleotide
agyaayaayagyagyaayaay

SEQ ID NO: 2735 - DNA, 21 bp, Artificial Sequence
  Description of Artificial Sequence: Synthetic oligonucleotide
agyaayaayagyaayagyaay

SEQ ID NO: 2736 - DNA, 21 bp, Artificial Sequence
  Description of Artificial Sequence: Synthetic oligonucleotide
agyaayaayagyaayaayagy

SEQ ID NO: 2737 - DNA, 21 bp, Artificial Sequence
  Description of Artificial Sequence: Synthetic oligonucleotide
agyaayaayaayagyaayagy

SEQ ID NO: 2738 - DNA, 21 bp, Artificial Sequence
  Description of Artificial Sequence: Synthetic oligonucleotide
agyaayaayaayagyagyaay

SEQ ID NO: 2739 - DNA, 21 bp, Artificial Sequence
  Description of Artificial Sequence: Synthetic oligonucleotide
agyaayaayaayaayagyagy

SEQ ID NO: 2740 - DNA, 21 bp, Artificial Sequence
  Description of Artificial Sequence: Synthetic oligonucleotide
agyagyaayagyaayaayaay

SEQ ID NO: 2741 - DNA, 21 bp, Artificial Sequence
  Description of Artificial Sequence: Synthetic oligonucleotide
agyagyaayaayagyaayaay

SEQ ID NO: 2742 - DNA, 21 bp, Artificial Sequence
  Description of Artificial Sequence: Synthetic oligonucleotide
agyagyaayaayaayagyaay

SEQ ID NO: 2743 - DNA, 21 bp, Artificial Sequence
  Description of Artificial Sequence: Synthetic oligonucleotide
agyagyaayaayaayaayagy

SEQ ID NO: 2744 - DNA, 21 bp, Artificial Sequence
  Description of Artificial Sequence: Synthetic oligonucleotide
aayagyagyagyaayaayaay

SEQ ID NO: 2745 - DNA, 21 bp, Artificial Sequence
  Description of Artificial Sequence: Synthetic oligonucleotide
aayagyagyaayagyaayaay

SEQ ID NO: 2746 - DNA, 21 bp, Artificial Sequence
  Description of Artificial Sequence: Synthetic oligonucleotide
aayagyagyaayaayagyaay

SEQ ID NO: 2747 - DNA, 21 bp, Artificial Sequence
  Description of Artificial Sequence: Synthetic oligonucleotide
aayagyagyaayaayaayagy

SEQ ID NO: 2748 - DNA, 21 bp, Artificial Sequence
  Description of Artificial Sequence: Synthetic oligonucleotide
aayagyaayagyagyaayaay

SEQ ID NO: 2749 - DNA, 21 bp, Artificial Sequence
  Description of Artificial Sequence: Synthetic oligonucleotide
aayagyaayaayagyagyaay

SEQ ID NO: 2750 - DNA, 21 bp, Artificial Sequence
  Description of Artificial Sequence: Synthetic oligonucleotide
aayagyaayaayaayagyagy

SEQ ID NO: 2751 - DNA, 21 bp, Artificial Sequence
  Description of Artificial Sequence: Synthetic oligonucleotide
aayagyaayagyaayagyaay

SEQ ID NO: 2752 - DNA, 21 bp, Artificial Sequence
  Description of Artificial Sequence: Synthetic oligonucleotide
aayagyaayagyaayaayagy

SEQ ID NO: 2753 - DNA, 21 bp, Artificial Sequence
  Description of Artificial Sequence: Synthetic oligonucleotide
aayagyaayaayagyaayagy

SEQ ID NO: 2754 - DNA, 21 bp, Artificial Sequence
  Description of Artificial Sequence: Synthetic oligonucleotide
aayaayagyagyagyaayaay

SEQ ID NO: 2755 - DNA, 21 bp, Artificial Sequence
  Description of Artificial Sequence: Synthetic oligonucleotide
aayaayagyagyaayagyaay

SEQ ID NO: 2756 - DNA, 21 bp, Artificial Sequence
  Description of Artificial Sequence: Synthetic oligonucleotide
aayaayagyagyaayaayagy

SEQ ID NO: 2757 - DNA, 21 bp, Artificial Sequence
  Description of Artificial Sequence: Synthetic oligonucleotide
aayaayagyaayagyagyaay

SEQ ID NO: 2758 - DNA, 21 bp, Artificial Sequence
  Description of Artificial Sequence: Synthetic oligonucleotide
aayaayagyaayagyaayagy

SEQ ID NO: 2759 - DNA, 21 bp, Artificial Sequence
  Description of Artificial Sequence: Synthetic oligonucleotide
aayaayagyaayaayagyagy

SEQ ID NO: 2760 - DNA, 21 bp, Artificial Sequence
  Description of Artificial Sequence: Synthetic oligonucleotide
aayaayaayagyagyagyaay

SEQ ID NO: 2761 - DNA, 21 bp, Artificial Sequence
  Description of Artificial Sequence: Synthetic oligonucleotide
aayaayaayagyagyaayagy

SEQ ID NO: 2762 - DNA, 21 bp, Artificial Sequence
  Description of Artificial Sequence: Synthetic oligonucleotide
aayaayaayagyaayagyagy

SEQ ID NO: 2763 - DNA, 21 bp, Artificial Sequence
  Description of Artificial Sequence: Synthetic oligonucleotide
aayaayaayaayaayagyagy

SEQ ID NO: 2764 - DNA, 21 bp, Artificial Sequence
  Description of Artificial Sequence: Synthetic oligonucleotide
agyagyaayaayaayaayaay

SEQ ID NO: 2765 - DNA, 21 bp, Artificial Sequence
  Description of Artificial Sequence: Synthetic oligonucleotide
agyaayagyaayaayaayaay

SEQ ID NO: 2766 - DNA, 21 bp, Artificial Sequence
  Description of Artificial Sequence: Synthetic oligonucleotide
agyaayaayagyaayaayaay

SEQ ID NO: 2767 - DNA, 21 bp, Artificial Sequence
  Description of Artificial Sequence: Synthetic oligonucleotide
agyaayaayaayagyaayaay

SEQ ID NO: 2768 - DNA, 21 bp, Artificial Sequence
  Description of Artificial Sequence: Synthetic oligonucleotide
agyaayaayaayaayagyaay

SEQ ID NO: 2769 - DNA, 21 bp, Artificial Sequence
  Description of Artificial Sequence: Synthetic oligonucleotide
agyaayaayaayaayaayagy

SEQ ID NO: 2770 - DNA, 21 bp, Artificial Sequence
  Description of Artificial Sequence: Synthetic oligonucleotide
aayagyagyaayaayaayaay

SEQ ID NO: 2771 - DNA, 21 bp, Artificial Sequence
  Description of Artificial Sequence: Synthetic oligonucleotide
aayagyaayagyaayaayaay

SEQ ID NO: 2772 - DNA, 21 bp, Artificial Sequence
  Description of Artificial Sequence: Synthetic oligonucleotide
aayagyaayaayagyaayaay

SEQ ID NO: 2773 - DNA, 21 bp, Artificial Sequence
  Description of Artificial Sequence: Synthetic oligonucleotide
aayagyaayaayaayagyaay

SEQ ID NO: 2774 - DNA, 21 bp, Artificial Sequence
  Description of Artificial Sequence: Synthetic oligonucleotide
aayagyaayaayaayaayagy

SEQ ID NO: 2775 - DNA, 21 bp, Artificial Sequence
  Description of Artificial Sequence: Synthetic oligonucleotide
aayaayagyagyaayaayaay

SEQ ID NO: 2776 - DNA, 21 bp, Artificial Sequence
  Description of Artificial Sequence: Synthetic oligonucleotide
aayaayagyaayagyaayaay

SEQ ID NO: 2777 - DNA, 21 bp, Artificial Sequence
  Description of Artificial Sequence: Synthetic oligonucleotide
aayaayagyaayaayagyaay

SEQ ID NO: 2778 - DNA, 21 bp, Artificial Sequence
  Description of Artificial Sequence: Synthetic oligonucleotide
aayaayagyaayaayaayagy

SEQ ID NO: 2779 - DNA, 21 bp, Artificial Sequence
  Description of Artificial Sequence: Synthetic oligonucleotide
aayaayaayagyagyaayaay

SEQ ID NO: 2780 - DNA, 21 bp, Artificial Sequence
  Description of Artificial Sequence: Synthetic oligonucleotide
aayaayaayagyaayagyaay

SEQ ID NO: 2781 - DNA, 21 bp, Artificial Sequence
  Description of Artificial Sequence: Synthetic oligonucleotide
aayaayaayagyaayaayagy

SEQ ID NO: 2782 - DNA, 21 bp, Artificial Sequence
  Description of Artificial Sequence: Synthetic oligonucleotide
aayaayaayaayagyagyaay

SEQ ID NO: 2783 - DNA, 21 bp, Artificial Sequence
  Description of Artificial Sequence: Synthetic oligonucleotide
aayaayaayaayagyaayagy

SEQ ID NO: 2784 - DNA, 21 bp, Artificial Sequence
  Description of Artificial Sequence: Synthetic oligonucleotide
aayaayaayaayaayaayagy

SEQ ID NO: 2785 - DNA, 21 bp, Artificial Sequence
  Description of Artificial Sequence: Synthetic oligonucleotide
agyaayaayaayaayaayaay

SEQ ID NO: 2786 - DNA, 21 bp, Artificial Sequence
  Description of Artificial Sequence: Synthetic oligonucleotide
aayagyaayaayaayaayaay

SEQ ID NO: 2787 - DNA, 21 bp, Artificial Sequence
  Description of Artificial Sequence: Synthetic oligonucleotide
aayaayagyaayaayaayaay

SEQ ID NO: 2788 - DNA, 21 bp, Artificial Sequence
  Description of Artificial Sequence: Synthetic oligonucleotide
aayaayaayagyaayaayaay

SEQ ID NO: 2789 - DNA, 21 bp, Artificial Sequence
  Description of Artificial Sequence: Synthetic oligonucleotide
aayaayaayaayagyaayaay

SEQ ID NO: 2790 - DNA, 21 bp, Artificial Sequence
  Description of Artificial Sequence: Synthetic oligonucleotide
aayaayaayaayaayagyaay

SEQ ID NO: 2791 - DNA, 12 bp, Artificial Sequence
  Description of Artificial Sequence: Synthetic oligonucleotide
aayaayaaycar

SEQ ID NO: 2792 - DNA, 12 bp, Artificial Sequence
  Description of Artificial Sequence: Synthetic oligonucleotide
caraayaayaay

SEQ ID NO: 2793 - DNA, 12 bp, Artificial Sequence
  Description of Artificial Sequence: Synthetic oligonucleotide
aaycaraayaay

SEQ ID NO: 2794 - DNA, 12 bp, Artificial Sequence
  Description of Artificial Sequence: Synthetic oligonucleotide
aayaaycaraay

SEQ ID NO: 2795 - DNA, 15 bp, Artificial Sequence
  Description of Artificial Sequence: Synthetic oligonucleotide
aayaayaayaaycar

SEQ ID NO: 2796 - DNA, 15 bp, Artificial Sequence
  Description of Artificial Sequence: Synthetic oligonucleotide
caraayaayaayaay

SEQ ID NO: 2797 - DNA, 15 bp, Artificial Sequence
  Description of Artificial Sequence: Synthetic oligonucleotide
aaycaraayaayaay

SEQ ID NO: 2798 - DNA, 15 bp, Artificial Sequence
  Description of Artificial Sequence: Synthetic oligonucleotide
aayaaycaraayaay

SEQ ID NO: 2799 - DNA, 15 bp, Artificial Sequence
  Description of Artificial Sequence: Synthetic oligonucleotide
aayaayaaycaraay

SEQ ID NO: 2800 - DNA, 15 bp, Artificial Sequence
  Description of Artificial Sequence: Synthetic oligonucleotide
aayaayaaycarcar

SEQ ID NO: 2801 - DNA, 15 bp, Artificial Sequence
  Description of Artificial Sequence: Synthetic oligonucleotide
carcaraayaayaay

SEQ ID NO: 2802 - DNA, 15 bp, Artificial Sequence
  Description of Artificial Sequence: Synthetic oligonucleotide
caraaycaraayaay

SEQ ID NO: 2803 - DNA, 15 bp, Artificial Sequence
  Description of Artificial Sequence: Synthetic oligonucleotide
caraayaaycaraay

SEQ ID NO: 2804 - DNA, 15 bp, Artificial Sequence
  Description of Artificial Sequence: Synthetic oligonucleotide
caraayaayaaycar

SEQ ID NO: 2805 - DNA, 15 bp, Artificial Sequence
  Description of Artificial Sequence: Synthetic oligonucleotide
aaycarcaraayaay

SEQ ID NO: 2806 - DNA, 15 bp, Artificial Sequence
  Description of Artificial Sequence: Synthetic oligonucleotide
aaycaraaycaraay

SEQ ID NO: 2807 - DNA, 15 bp, Artificial Sequence
  Description of Artificial Sequence: Synthetic oligonucleotide
aaycaraayaaycar

SEQ ID NO: 2808 - DNA, 15 bp, Artificial Sequence
  Description of Artificial Sequence: Synthetic oligonucleotide
aayaaycarcaraay

SEQ ID NO: 2809 - DNA, 15 bp, Artificial Sequence
  Description of Artificial Sequence: Synthetic oligonucleotide
aayaaycaraaycar

SEQ ID NO: 2810 - DNA, 18 bp, Artificial Sequence
  Description of Artificial Sequence: Synthetic oligonucleotide
aayaayaayaayaaycar

SEQ ID NO: 2811 - DNA, 18 bp, Artificial Sequence
  Description of Artificial Sequence: Synthetic oligonucleotide
caraayaayaayaayaay

SEQ ID NO: 2812 - DNA, 18 bp, Artificial Sequence
  Description of Artificial Sequence: Synthetic oligonucleotide
aaycaraayaayaayaay

SEQ ID NO: 2813 - DNA, 18 bp, Artificial Sequence
  Description of Artificial Sequence: Synthetic oligonucleotide
aayaaycaraayaayaay

SEQ ID NO: 2814 - DNA, 18 bp, Artificial Sequence
  Description of Artificial Sequence: Synthetic oligonucleotide
aayaayaaycaraayaay

SEQ ID NO: 2815 - DNA, 18 bp, Artificial Sequence
  Description of Artificial Sequence: Synthetic oligonucleotide
aayaayaayaaycaraay

SEQ ID NO: 2816 - DNA, 18 bp, Artificial Sequence
  Description of Artificial Sequence: Synthetic oligonucleotide
aayaayaayaaycarcar

SEQ ID NO: 2817 - DNA, 18 bp, Artificial Sequence
  Description of Artificial Sequence: Synthetic oligonucleotide
carcaraayaayaayaay

SEQ ID NO: 2818 - DNA, 18 bp, Artificial Sequence
  Description of Artificial Sequence: Synthetic oligonucleotide
caraaycaraayaayaay

SEQ ID NO: 2819 - DNA, 18 bp, Artificial Sequence
  Description of Artificial Sequence: Synthetic oligonucleotide
caraayaaycaraayaay

SEQ ID NO: 2820 - DNA, 18 bp, Artificial Sequence
  Description of Artificial Sequence: Synthetic oligonucleotide
caraayaayaaycaraay

SEQ ID NO: 2821 - DNA, 18 bp, Artificial Sequence
  Description of Artificial Sequence: Synthetic oligonucleotide
caraayaayaayaaycar

SEQ ID NO: 2822 - DNA, 18 bp, Artificial Sequence
  Description of Artificial Sequence: Synthetic oligonucleotide
aaycarcaraayaayaay

SEQ ID NO: 2823 - DNA, 18 bp, Artificial Sequence
  Description of Artificial Sequence: Synthetic oligonucleotide
aaycaraaycaraayaay

SEQ ID NO: 2824 - DNA, 18 bp, Artificial Sequence
  Description of Artificial Sequence: Synthetic oligonucleotide
aaycaraayaaycaraay

SEQ ID NO: 2825 - DNA, 18 bp, Artificial Sequence
  Description of Artificial Sequence: Synthetic oligonucleotide
aaycaraayaayaaycar

SEQ ID NO: 2826 - DNA, 18 bp, Artificial Sequence
  Description of Artificial Sequence: Synthetic oligonucleotide
aayaaycarcaraayaay

SEQ ID NO: 2827 - DNA, 18 bp, Artificial Sequence
  Description of Artificial Sequence: Synthetic oligonucleotide
aayaaycaraaycaraay

SEQ ID NO: 2828 - DNA, 18 bp, Artificial Sequence
  Description of Artificial Sequence: Synthetic oligonucleotide
aayaaycaraayaaycar

SEQ ID NO: 2829 - DNA, 18 bp, Artificial Sequence
  Description of Artificial Sequence: Synthetic oligonucleotide
aayaayaaycarcaraay

SEQ ID NO: 2830 - DNA, 18 bp, Artificial Sequence
  Description of Artificial Sequence: Synthetic oligonucleotide
aayaayaaycaraaycar

SEQ ID NO: 2831 - DNA, 21 bp, Artificial Sequence
  Description of Artificial Sequence: Synthetic oligonucleotide
aayaayaayaaycarcarcar

SEQ ID NO: 2832 - DNA, 21 bp, Artificial Sequence
  Description of Artificial Sequence: Synthetic oligonucleotide
carcarcaraayaayaayaay

SEQ ID NO: 2833 - DNA, 21 bp, Artificial Sequence
  Description of Artificial Sequence: Synthetic oligonucleotide
caraaycarcaraayaayaay

SEQ ID NO: 2834 - DNA, 21 bp, Artificial Sequence
  Description of Artificial Sequence: Synthetic oligonucleotide
caraaycaraaycaraayaay

SEQ ID NO: 2835 - DNA, 21 bp, Artificial Sequence
  Description of Artificial Sequence: Synthetic oligonucleotide
caraaycaraayaaycaraay

SEQ ID NO: 2836 - DNA, 21 bp, Artificial Sequence
  Description of Artificial Sequence: Synthetic oligonucleotide
caraaycaraayaayaaycar

SEQ ID NO: 2837 - DNA, 21 bp, Artificial Sequence
  Description of Artificial Sequence: Synthetic oligonucleotide
caraayaaycarcaraayaay

SEQ ID NO: 2838 - DNA, 21 bp, Artificial Sequence
  Description of Artificial Sequence: Synthetic oligonucleotide
caraayaaycaraaycaraay

SEQ ID NO: 2839 - DNA, 21 bp, Artificial Sequence
  Description of Artificial Sequence: Synthetic oligonucleotide
caraayaaycaraayaaycar

SEQ ID NO: 2840 - DNA, 21 bp, Artificial Sequence
  Description of Artificial Sequence: Synthetic oligonucleotide
caraayaayaaycaraaycar

SEQ ID NO: 2841 - DNA, 21 bp, Artificial Sequence
  Description of Artificial Sequence: Synthetic oligonucleotide
caraayaayaaycarcaraay

SEQ ID NO: 2842 - DNA, 21 bp, Artificial Sequence
  Description of Artificial Sequence: Synthetic oligonucleotide
caraayaayaayaaycarcar

SEQ ID NO: 2843 - DNA, 21 bp, Artificial Sequence
  Description of Artificial Sequence: Synthetic oligonucleotide
carcaraaycaraayaayaay

SEQ ID NO: 2844 - DNA, 21 bp, Artificial Sequence
  Description of Artificial Sequence: Synthetic oligonucleotide
carcaraayaaycaraayaay

SEQ ID NO: 2845 - DNA, 21 bp, Artificial Sequence
  Description of Artificial Sequence: Synthetic oligonucleotide
carcaraayaayaaycaraay

SEQ ID NO: 2846 - DNA, 21 bp, Artificial Sequence
  Description of Artificial Sequence: Synthetic oligonucleotide
carcaraayaayaayaaycar

SEQ ID NO: 2847 - DNA, 21 bp, Artificial Sequence
  Description of Artificial Sequence: Synthetic oligonucleotide
aaycarcarcaraayaayaay

SEQ ID NO: 2848 - DNA, 21 bp, Artificial Sequence
  Description of Artificial Sequence: Synthetic oligonucleotide
aaycarcaraaycaraayaay

SEQ ID NO: 2849 - DNA, 21 bp, Artificial Sequence
  Description of Artificial Sequence: Synthetic oligonucleotide
aaycarcaraayaaycaraay

SEQ ID NO: 2850 - DNA, 21 bp, Artificial Sequence
  Description of Artificial Sequence: Synthetic oligonucleotide
aaycarcaraayaayaaycar

SEQ ID NO: 2851 - DNA, 21 bp, Artificial Sequence
  Description of Artificial Sequence: Synthetic oligonucleotide
aaycaraaycarcaraayaay

SEQ ID NO: 2852 - DNA, 21 bp, Artificial Sequence
  Description of Artificial Sequence: Synthetic oligonucleotide
aaycaraayaaycarcaraay

SEQ ID NO: 2853 - DNA, 21 bp, Artificial Sequence
  Description of Artificial Sequence: Synthetic oligonucleotide
aaycaraayaayaaycarcar

SEQ ID NO: 2854 - DNA, 21 bp, Artificial Sequence
  Description of Artificial Sequence: Synthetic oligonucleotide
aaycaraaycaraaycaraay

SEQ ID NO: 2855 - DNA, 21 bp, Artificial Sequence
  Description of Artificial Sequence: Synthetic oligonucleotide
aaycaraaycaraayaaycar

SEQ ID NO: 2856 - DNA, 21 bp, Artificial Sequence
  Description of Artificial Sequence: Synthetic oligonucleotide
aaycaraayaaycaraaycar

SEQ ID NO: 2857 - DNA, 21 bp, Artificial Sequence
  Description of Artificial Sequence: Synthetic oligonucleotide
aayaaycarcarcaraayaay

SEQ ID NO: 2858 - DNA, 21 bp, Artificial Sequence
  Description of Artificial Sequence: Synthetic oligonucleotide
aayaaycarcaraaycaraay

SEQ ID NO: 2859 - DNA, 21 bp, Artificial Sequence
  Description of Artificial Sequence: Synthetic oligonucleotide
aayaaycarcaraayaaycar

SEQ ID NO: 2860 - DNA, 21 bp, Artificial Sequence
  Description of Artificial Sequence: Synthetic oligonucleotide
aayaaycaraaycarcaraay

SEQ ID NO: 2861 - DNA, 21 bp, Artificial Sequence
  Description of Artificial Sequence: Synthetic oligonucleotide
aayaaycaraaycaraaycar

SEQ ID NO: 2862 - DNA, 21 bp, Artificial Sequence
  Description of Artificial Sequence: Synthetic oligonucleotide
aayaaycaraayaaycarcar

SEQ ID NO: 2863 - DNA, 21 bp, Artificial Sequence
  Description of Artificial Sequence: Synthetic oligonucleotide
aayaayaaycarcarcaraay

SEQ ID NO: 2864 - DNA, 21 bp, Artificial Sequence
  Description of Artificial Sequence: Synthetic oligonucleotide
aayaayaaycarcaraaycar

SEQ ID NO: 2865 - DNA, 21 bp, Artificial Sequence
  Description of Artificial Sequence: Synthetic oligonucleotide
aayaayaaycaraaycarcar

SEQ ID NO: 2866 - DNA, 21 bp, Artificial Sequence
  Description of Artificial Sequence: Synthetic oligonucleotide
aayaayaayaayaaycarcar

SEQ ID NO: 2867 - DNA, 21 bp, Artificial Sequence
  Description of Artificial Sequence: Synthetic oligonucleotide
carcaraayaayaayaayaay

SEQ ID NO: 2868 - DNA, 21 bp, Artificial Sequence
  Description of Artificial Sequence: Synthetic oligonucleotide
caraaycaraayaayaayaay

SEQ ID NO: 2869 - DNA, 21 bp, Artificial Sequence
  Description of Artificial Sequence: Synthetic oligonucleotide
caraayaaycaraayaayaay

SEQ ID NO: 2870 - DNA, 21 bp, Artificial Sequence
  Description of Artificial Sequence: Synthetic oligonucleotide
caraayaayaaycaraayaay

SEQ ID NO: 2871 - DNA, 21 bp, Artificial Sequence
  Description of Artificial Sequence: Synthetic oligonucleotide
caraayaayaayaaycaraay

SEQ ID NO: 2872 - DNA, 21 bp, Artificial Sequence
  Description of Artificial Sequence: Synthetic oligonucleotide
caraayaayaayaayaaycar

SEQ ID NO: 2873 - DNA, 21 bp, Artificial Sequence
  Description of Artificial Sequence: Synthetic oligonucleotide
aaycarcaraayaayaayaay

SEQ ID NO: 2874 - DNA, 21 bp, Artificial Sequence
  Description of Artificial Sequence: Synthetic oligonucleotide
aaycaraaycaraayaayaay

SEQ ID NO: 2875 - DNA, 21 bp, Artificial Sequence
  Description of Artificial Sequence: Synthetic oligonucleotide
aaycaraayaaycaraayaay

SEQ ID NO: 2876 - DNA, 21 bp, Artificial Sequence
  Description of Artificial Sequence: Synthetic oligonucleotide
aaycaraayaayaaycaraay

SEQ ID NO: 2877 - DNA, 21 bp, Artificial Sequence
  Description of Artificial Sequence: Synthetic oligonucleotide
aaycaraayaayaayaaycar

SEQ ID NO: 2878 - DNA, 21 bp, Artificial Sequence
  Description of Artificial Sequence: Synthetic oligonucleotide
aayaaycarcaraayaayaay

SEQ ID NO: 2879 - DNA, 21 bp, Artificial Sequence
  Description of Artificial Sequence: Synthetic oligonucleotide
aayaaycaraaycaraayaay

SEQ ID NO: 2880 - DNA, 21 bp, Artificial Sequence
  Description of Artificial Sequence: Synthetic oligonucleotide
aayaaycaraayaaycaraay

SEQ ID NO: 2881 - DNA, 21 bp, Artificial Sequence
  Description of Artificial Sequence: Synthetic oligonucleotide
aayaaycaraayaayaaycar

SEQ ID NO: 2882 - DNA, 21 bp, Artificial Sequence
  Description of Artificial Sequence: Synthetic oligonucleotide
aayaayaaycarcaraayaay

SEQ ID NO: 2883 - DNA, 21 bp, Artificial Sequence
  Description of Artificial Sequence: Synthetic oligonucleotide
aayaayaaycaraaycaraay

SEQ ID NO: 2884 - DNA, 21 bp, Artificial Sequence
  Description of Artificial Sequence: Synthetic oligonucleotide
aayaayaaycaraayaaycar

SEQ ID NO: 2885 - DNA, 21 bp, Artificial Sequence
  Description of Artificial Sequence: Synthetic oligonucleotide
aayaayaayaaycarcaraay

SEQ ID NO: 2886 - DNA, 21 bp, Artificial Sequence
  Description of Artificial Sequence: Synthetic oligonucleotide
aayaayaayaaycaraaycar

SEQ ID NO: 2887 - DNA, 21 bp, Artificial Sequence
  Description of Artificial Sequence: Synthetic oligonucleotide
aayaayaayaayaayaaycar

SEQ ID NO: 2888 - DNA, 21 bp, Artificial Sequence
  Description of Artificial Sequence: Synthetic oligonucleotide
caraayaayaayaayaayaay

SEQ ID NO: 2889 - DNA, 21 bp, Artificial Sequence
  Description of Artificial Sequence: Synthetic oligonucleotide
aaycaraayaayaayaayaay

SEQ ID NO: 2890 - DNA, 21 bp, Artificial Sequence
  Description of Artificial Sequence: Synthetic oligonucleotide
aayaaycaraayaayaayaay

SEQ ID NO: 2891 - DNA, 21 bp, Artificial Sequence
  Description of Artificial Sequence: Synthetic oligonucleotide
aayaayaaycaraayaayaay

SEQ ID NO: 2892 - DNA, 21 bp, Artificial Sequence
  Description of Artificial Sequence: Synthetic oligonucleotide
aayaayaayaaycaraayaay

SEQ ID NO: 2893 - DNA, 21 bp, Artificial Sequence
  Description of Artificial Sequence: Synthetic oligonucleotide
aayaayaayaayaaycaraay

SEQ ID NO: 2894 - DNA, 12 bp, Artificial Sequence
  Description of Artificial Sequence: Synthetic oligonucleotide
aayaayaaygar

SEQ ID NO: 2895 - DNA, 12 bp, Artificial Sequence
  Description of Artificial Sequence: Synthetic oligonucleotide
garaayaayaay

SEQ ID NO: 2896 - DNA, 12 bp, Artificial Sequence
  Description of Artificial Sequence: Synthetic oligonucleotide
aaygaraayaay

SEQ ID NO: 2897 - DNA, 12 bp, Artificial Sequence
  Description of Artificial Sequence: Synthetic oligonucleotide
aayaaygaraay

SEQ ID NO: 2898 - DNA, 15 bp, Artificial Sequence
  Description of Artificial Sequence: Synthetic oligonucleotide
aayaayaayaaygar

SEQ ID NO: 2899 - DNA, 15 bp, Artificial Sequence
  Description of Artificial Sequence: Synthetic oligonucleotide
garaayaayaayaay

SEQ ID NO: 2900 - DNA, 15 bp, Artificial Sequence
  Description of Artificial Sequence: Synthetic oligonucleotide
aaygaraayaayaay

SEQ ID NO: 2901 - DNA, 15 bp, Artificial Sequence
  Description of Artificial Sequence: Synthetic oligonucleotide
aayaaygaraayaay

SEQ ID NO: 2902 - DNA, 15 bp, Artificial Sequence
  Description of Artificial Sequence: Synthetic oligonucleotide
aayaayaaygaraay

SEQ ID NO: 2903 - DNA, 15 bp, Artificial Sequence
  Description of Artificial Sequence: Synthetic oligonucleotide
aayaayaaygargar

SEQ ID NO: 2904 - DNA, 15 bp, Artificial Sequence
  Description of Artificial Sequence: Synthetic oligonucleotide
gargaraayaayaay

SEQ ID NO: 2905 - DNA, 15 bp, Artificial Sequence
  Description of Artificial Sequence: Synthetic oligonucleotide
garaaygaraayaay

SEQ ID NO: 2906 - DNA, 15 bp, Artificial Sequence
  Description of Artificial Sequence: Synthetic oligonucleotide
garaayaaygaraay

SEQ ID NO: 2907 - DNA, 15 bp, Artificial Sequence
  Description of Artificial Sequence: Synthetic oligonucleotide
garaayaayaaygar

SEQ ID NO: 2908 - DNA, 15 bp, Artificial Sequence
  Description of Artificial Sequence: Synthetic oligonucleotide
aaygargaraayaay

SEQ ID NO: 2909 - DNA, 15 bp, Artificial Sequence
  Description of Artificial Sequence: Synthetic oligonucleotide
aaygaraaygaraay

SEQ ID NO: 2910 - DNA, 15 bp, Artificial Sequence
  Description of Artificial Sequence: Synthetic oligonucleotide
aaygaraayaaygar

SEQ ID NO: 2911 - DNA, 15 bp, Artificial Sequence
  Description of Artificial Sequence: Synthetic oligonucleotide
aayaaygargaraay

SEQ ID NO: 2912 - DNA, 15 bp, Artificial Sequence
  Description of Artificial Sequence: Synthetic oligonucleotide
aayaaygaraaygar

SEQ ID NO: 2913 - DNA, 18 bp, Artificial Sequence
  Description of Artificial Sequence: Synthetic oligonucleotide
aayaayaayaayaaygar

SEQ ID NO: 2914 - DNA, 18 bp, Artificial Sequence
  Description of Artificial Sequence: Synthetic oligonucleotide
garaayaayaayaayaay

SEQ ID NO: 2915 - DNA, 18 bp, Artificial Sequence
  Description of Artificial Sequence: Synthetic oligonucleotide
aaygaraayaayaayaay

SEQ ID NO: 2916 - DNA, 18 bp, Artificial Sequence
  Description of Artificial Sequence: Synthetic oligonucleotide
aayaaygaraayaayaay

SEQ ID NO: 2917 - DNA, 18 bp, Artificial Sequence
  Description of Artificial Sequence: Synthetic oligonucleotide
aayaayaaygaraayaay

SEQ ID NO: 2918 - DNA, 18 bp, Artificial Sequence
  Description of Artificial Sequence: Synthetic oligonucleotide
aayaayaayaaygaraay

SEQ ID NO: 2919 - DNA, 18 bp, Artificial Sequence
  Description of Artificial Sequence: Synthetic oligonucleotide
aayaayaayaaygargar

SEQ ID NO: 2920 - DNA, 18 bp, Artificial Sequence
  Description of Artificial Sequence: Synthetic oligonucleotide
gargaraayaayaayaay

SEQ ID NO: 2921 - DNA, 18 bp, Artificial Sequence
  Description of Artificial Sequence: Synthetic oligonucleotide
garaaygaraayaayaay

SEQ ID NO: 2922 - DNA, 18 bp, Artificial Sequence
  Description of Artificial Sequence: Synthetic oligonucleotide
garaayaaygaraayaay

SEQ ID NO: 2923 - DNA, 18 bp, Artificial Sequence
  Description of Artificial Sequence: Synthetic oligonucleotide
garaayaayaaygaraay

SEQ ID NO: 2924 - DNA, 18 bp, Artificial Sequence
  Description of Artificial Sequence: Synthetic oligonucleotide
garaayaayaayaaygar

SEQ ID NO: 2925 - DNA, 18 bp, Artificial Sequence
  Description of Artificial Sequence: Synthetic oligonucleotide
aaygargaraayaayaay

SEQ ID NO: 2926 - DNA, 18 bp, Artificial Sequence
  Description of Artificial Sequence: Synthetic oligonucleotide
aaygaraaygaraayaay

SEQ ID NO: 2927 - DNA, 18 bp, Artificial Sequence
  Description of Artificial Sequence: Synthetic oligonucleotide
aaygaraayaaygaraay

SEQ ID NO: 2928 - DNA, 18 bp, Artificial Sequence
  Description of Artificial Sequence: Synthetic oligonucleotide
aaygaraayaayaaygar

SEQ ID NO: 2929 - DNA, 18 bp, Artificial Sequence
  Description of Artificial Sequence: Synthetic oligonucleotide
aayaaygargaraayaay

SEQ ID NO: 2930 - DNA, 18 bp, Artificial Sequence
  Description of Artificial Sequence: Synthetic oligonucleotide
aayaaygaraaygaraay

SEQ ID NO: 2931 - DNA, 18 bp, Artificial Sequence
  Description of Artificial Sequence: Synthetic oligonucleotide
aayaaygaraayaaygar

SEQ ID NO: 2932 - DNA, 18 bp, Artificial Sequence
  Description of Artificial Sequence: Synthetic oligonucleotide
aayaayaaygargaraay

SEQ ID NO: 2933 - DNA, 18 bp, Artificial Sequence
  Description of Artificial Sequence: Synthetic oligonucleotide
aayaayaaygaraaygar

SEQ ID NO: 2934 - DNA, 21 bp, Artificial Sequence
  Description of Artificial Sequence: Synthetic oligonucleotide
aayaayaayaaygargargar

SEQ ID NO: 2935 - DNA, 21 bp, Artificial Sequence
  Description of Artificial Sequence: Synthetic oligonucleotide
gargargaraayaayaayaay

SEQ ID NO: 2936 - DNA, 21 bp, Artificial Sequence
  Description of Artificial Sequence: Synthetic oligonucleotide
garaaygargaraayaayaay

SEQ ID NO: 2937 - DNA, 21 bp, Artificial Sequence
  Description of Artificial Sequence: Synthetic oligonucleotide
garaaygaraaygaraayaay

SEQ ID NO: 2938 - DNA, 21 bp, Artificial Sequence
  Description of Artificial Sequence: Synthetic oligonucleotide
garaaygaraayaaygaraay

SEQ ID NO: 2939 - DNA, 21 bp, Artificial Sequence
  Description of Artificial Sequence: Synthetic oligonucleotide
garaaygaraayaayaaygar

SEQ ID NO: 2940 - DNA, 21 bp, Artificial Sequence
  Description of Artificial Sequence: Synthetic oligonucleotide
garaayaaygargaraayaay

SEQ ID NO: 2941 - DNA, 21 bp, Artificial Sequence
  Description of Artificial Sequence: Synthetic oligonucleotide
garaayaaygaraaygaraay

SEQ ID NO: 2942 - DNA, 21 bp, Artificial Sequence
  Description of Artificial Sequence: Synthetic oligonucleotide
garaayaaygaraayaaygar

SEQ ID NO: 2943 - DNA, 21 bp, Artificial Sequence
  Description of Artificial Sequence: Synthetic oligonucleotide
garaayaayaaygaraaygar

SEQ ID NO: 2944 - DNA, 21 bp, Artificial Sequence
  Description of Artificial Sequence: Synthetic oligonucleotide
garaayaayaaygargaraay

SEQ ID NO: 2945 - DNA, 21 bp, Artificial Sequence
  Description of Artificial Sequence: Synthetic oligonucleotide
garaayaayaayaaygargar

SEQ ID NO: 2946 - DNA, 21 bp, Artificial Sequence
  Description of Artificial Sequence: Synthetic oligonucleotide
gargaraaygaraayaayaay

SEQ ID NO: 2947 - DNA, 21 bp, Artificial Sequence
  Description of Artificial Sequence: Synthetic oligonucleotide
gargaraayaaygaraayaay

SEQ ID NO: 2948 - DNA, 21 bp, Artificial Sequence
  Description of Artificial Sequence: Synthetic oligonucleotide
gargaraayaayaaygaraay

SEQ ID NO: 2949 - DNA, 21 bp, Artificial Sequence
  Description of Artificial Sequence: Synthetic oligonucleotide
gargaraayaayaayaaygar

SEQ ID NO: 2950 - DNA, 21 bp, Artificial Sequence
  Description of Artificial Sequence: Synthetic oligonucleotide
aaygargargaraayaayaay

SEQ ID NO: 2951 - DNA, 21 bp, Artificial Sequence
  Description of Artificial Sequence: Synthetic oligonucleotide
aaygargaraaygaraayaay

SEQ ID NO: 2952 - DNA, 21 bp, Artificial Sequence
  Description of Artificial Sequence: Synthetic oligonucleotide
aaygargaraayaaygaraay

SEQ ID NO: 2953 - DNA, 21 bp, Artificial Sequence
  Description of Artificial Sequence: Synthetic oligonucleotide
aaygargaraayaayaaygar

SEQ ID NO: 2954 - DNA, 21 bp, Artificial Sequence
  Description of Artificial Sequence: Synthetic oligonucleotide
aaygaraaygargaraayaay

SEQ ID NO: 2955 - DNA, 21 bp, Artificial Sequence
  Description of Artificial Sequence: Synthetic oligonucleotide
aaygaraayaaygargaraay

SEQ ID NO: 2956 - DNA, 21 bp, Artificial Sequence
  Description of Artificial Sequence: Synthetic oligonucleotide
aaygaraayaayaaygargar

SEQ ID NO: 2957 - DNA, 21 bp, Artificial Sequence
  Description of Artificial Sequence: Synthetic oligonucleotide
aaygaraaygaraaygaraay

SEQ ID NO: 2958 - DNA, 21 bp, Artificial Sequence
  Description of Artificial Sequence: Synthetic oligonucleotide
aaygaraaygaraayaaygar

SEQ ID NO: 2959 - DNA, 21 bp, Artificial Sequence
  Description of Artificial Sequence: Synthetic oligonucleotide
aaygaraayaaygaraaygar

SEQ ID NO: 2960 - DNA, 21 bp, Artificial Sequence
  Description of Artificial Sequence: Synthetic oligonucleotide
aayaaygargargaraayaay

SEQ ID NO: 2961 - DNA, 21 bp, Artificial Sequence
  Description of Artificial Sequence: Synthetic oligonucleotide
aayaaygargaraaygaraay

SEQ ID NO: 2962 - DNA, 21 bp, Artificial Sequence
  Description of Artificial Sequence: Synthetic oligonucleotide
aayaaygargaraayaaygar

SEQ ID NO: 2963 - DNA, 21 bp, Artificial Sequence
  Description of Artificial Sequence: Synthetic oligonucleotide
aayaaygaraaygargaraay

SEQ ID NO: 2964 - DNA, 21 bp, Artificial Sequence
  Description of Artificial Sequence: Synthetic oligonucleotide
aayaaygaraaygaraaygar

SEQ ID NO: 2965 - DNA, 21 bp, Artificial Sequence
  Description of Artificial Sequence: Synthetic oligonucleotide
aayaaygaraayaaygargar

SEQ ID NO: 2966 - DNA, 21 bp, Artificial Sequence
  Description of Artificial Sequence: Synthetic oligonucleotide
aayaayaaygargargaraay

SEQ ID NO: 2967 - DNA, 21 bp, Artificial Sequence
  Description of Artificial Sequence: Synthetic oligonucleotide
aayaayaaygargaraaygar

SEQ ID NO: 2968 - DNA, 21 bp, Artificial Sequence
  Description of Artificial Sequence: Synthetic oligonucleotide
aayaayaaygaraaygargar

SEQ ID NO: 2969 - DNA, 21 bp, Artificial Sequence
  Description of Artificial Sequence: Synthetic oligonucleotide
aayaayaayaayaaygargar

SEQ ID NO: 2970 - DNA, 21 bp, Artificial Sequence
  Description of Artificial Sequence: Synthetic oligonucleotide
gargaraayaayaayaayaay

SEQ ID NO: 2971 - DNA, 21 bp, Artificial Sequence
  Description of Artificial Sequence: Synthetic oligonucleotide
garaaygaraayaayaayaay

SEQ ID NO: 2972 - DNA, 21 bp, Artificial Sequence
  Description of Artificial Sequence: Synthetic oligonucleotide
garaayaaygaraayaayaay

SEQ ID NO: 2973 - DNA, 21 bp, Artificial Sequence
  Description of Artificial Sequence: Synthetic oligonucleotide
garaayaayaaygaraayaay

SEQ ID NO: 2974 - DNA, 21 bp, Artificial Sequence
  Description of Artificial Sequence: Synthetic oligonucleotide
garaayaayaayaaygaraay

SEQ ID NO: 2975 - DNA, 21 bp, Artificial Sequence
  Description of Artificial Sequence: Synthetic oligonucleotide
garaayaayaayaayaaygar

SEQ ID NO: 2976 - DNA, 21 bp, Artificial Sequence
  Description of Artificial Sequence: Synthetic oligonucleotide
aaygargaraayaayaayaay

SEQ ID NO: 2977 - DNA, 21 bp, Artificial Sequence
  Description of Artificial Sequence: Synthetic oligonucleotide
aaygaraaygaraayaayaay

SEQ ID NO: 2978 - DNA, 21 bp, Artificial Sequence
  Description of Artificial Sequence: Synthetic oligonucleotide
aaygaraayaaygaraayaay

SEQ ID NO: 2979 - DNA, 21 bp, Artificial Sequence
  Description of Artificial Sequence: Synthetic oligonucleotide
aaygaraayaayaaygaraay

SEQ ID NO: 2980 - DNA, 21 bp, Artificial Sequence
  Description of Artificial Sequence: Synthetic oligonucleotide
aaygaraayaayaayaaygar

SEQ ID NO: 2981 - DNA, 21 bp, Artificial Sequence
  Description of Artificial Sequence: Synthetic oligonucleotide
aayaaygargaraayaayaay

SEQ ID NO: 2982 - DNA, 21 bp, Artificial Sequence
  Description of Artificial Sequence: Synthetic oligonucleotide
aayaaygaraaygaraayaay

SEQ ID NO: 2983 - DNA, 21 bp, Artificial Sequence
  Description of Artificial Sequence: Synthetic oligonucleotide
aayaaygaraayaaygaraay

SEQ ID NO: 2984 - DNA, 21 bp, Artificial Sequence
  Description of Artificial Sequence: Synthetic oligonucleotide
aayaaygaraayaayaaygar

SEQ ID NO: 2985 - DNA, 21 bp, Artificial Sequence
  Description of Artificial Sequence: Synthetic oligonucleotide
aayaayaaygargaraayaay

SEQ ID NO: 2986 - DNA, 21 bp, Artificial Sequence
  Description of Artificial Sequence: Synthetic oligonucleotide
aayaayaaygaraaygaraay

SEQ ID NO: 2987 - DNA, 21 bp, Artificial Sequence
  Description of Artificial Sequence: Synthetic oligonucleotide
aayaayaaygaraayaaygar

SEQ ID NO: 2988 - DNA, 21 bp, Artificial Sequence
  Description of Artificial Sequence: Synthetic oligonucleotide
aayaayaayaaygargaraay

SEQ ID NO: 2989 - DNA, 21 bp, Artificial Sequence
  Description of Artificial Sequence: Synthetic oligonucleotide
aayaayaayaaygaraaygar

SEQ ID NO: 2990 - DNA, 21 bp, Artificial Sequence
  Description of Artificial Sequence: Synthetic oligonucleotide
aayaayaayaayaayaaygar

SEQ ID NO: 2991 - DNA, 21 bp, Artificial Sequence
  Description of Artificial Sequence: Synthetic oligonucleotide
garaayaayaayaayaayaay

SEQ ID NO: 2992 - DNA, 21 bp, Artificial Sequence
  Description of Artificial Sequence: Synthetic oligonucleotide
aaygaraayaayaayaayaay

SEQ ID NO: 2993 - DNA, 21 bp, Artificial Sequence
  Description of Artificial Sequence: Synthetic oligonucleotide
aayaaygaraayaayaayaay

SEQ ID NO: 2994 - DNA, 21 bp, Artificial Sequence
  Description of Artificial Sequence: Synthetic oligonucleotide
aayaayaaygaraayaayaay

SEQ ID NO: 2995 - DNA, 21 bp, Artificial Sequence
  Description of Artificial Sequence: Synthetic oligonucleotide
aayaayaayaaygaraayaay

SEQ ID NO: 2996 - DNA, 21 bp, Artificial Sequence
  Description of Artificial Sequence: Synthetic oligonucleotide
aayaayaayaayaaygaraay

SEQ ID NO: 2997 - DNA, 12 bp, Artificial Sequence
  Description of Artificial Sequence: Synthetic oligonucleotide
aayaayaaycay

SEQ ID NO: 2998 - DNA, 12 bp, Artificial Sequence
  Description of Artificial Sequence: Synthetic oligonucleotide
cayaayaayaay

SEQ ID NO: 2999 - DNA, 12 bp, Artificial Sequence
  Description of Artificial Sequence: Synthetic oligonucleotide
aaycayaayaay

SEQ ID NO: 3000 - DNA, 12 bp, Artificial Sequence
  Description of Artificial Sequence: Synthetic oligonucleotide
aayaaycayaay

SEQ ID NO: 3001 - DNA, 15 bp, Artificial Sequence
  Description of Artificial Sequence: Synthetic oligonucleotide
aayaayaayaaycay

SEQ ID NO: 3002 - DNA, 15 bp, Artificial Sequence
  Description of Artificial Sequence: Synthetic oligonucleotide
cayaayaayaayaay

SEQ ID NO: 3003 - DNA, 15 bp, Artificial Sequence
  Description of Artificial Sequence: Synthetic oligonucleotide
aaycayaayaayaay

SEQ ID NO: 3004 - DNA, 15 bp, Artificial Sequence
  Description of Artificial Sequence: Synthetic oligonucleotide
aayaaycayaayaay

SEQ ID NO: 3005 - DNA, 15 bp, Artificial Sequence
  Description of Artificial Sequence: Synthetic oligonucleotide
aayaayaaycayaay

SEQ ID NO: 3006 - DNA, 15 bp, Artificial Sequence
  Description of Artificial Sequence: Synthetic oligonucleotide
aayaayaaycaycay

SEQ ID NO: 3007 - DNA, 15 bp, Artificial Sequence
  Description of Artificial Sequence: Synthetic oligonucleotide
caycayaayaayaay

SEQ ID NO: 3008 - DNA, 15 bp, Artificial Sequence
  Description of Artificial Sequence: Synthetic oligonucleotide
cayaaycayaayaay

SEQ ID NO: 3009 - DNA, 15 bp, Artificial Sequence
  Description of Artificial Sequence: Synthetic oligonucleotide
cayaayaaycayaay

SEQ ID NO: 3010 - DNA, 15 bp, Artificial Sequence
  Description of Artificial Sequence: Synthetic oligonucleotide
cayaayaayaaycay

SEQ ID NO: 3011 - DNA, 15 bp, Artificial Sequence
  Description of Artificial Sequence: Synthetic oligonucleotide
aaycaycayaayaay

SEQ ID NO: 3012 - DNA, 15 bp, Artificial Sequence
  Description of Artificial Sequence: Synthetic oligonucleotide
aaycayaaycayaay

SEQ ID NO: 3013 - DNA, 15 bp, Artificial Sequence
  Description of Artificial Sequence: Synthetic oligonucleotide
aaycayaayaaycay

SEQ ID NO: 3014 - DNA, 15 bp, Artificial Sequence
  Description of Artificial Sequence: Synthetic oligonucleotide
aayaaycaycayaay

SEQ ID NO: 3015 - DNA, 15 bp, Artificial Sequence
  Description of Artificial Sequence: Synthetic oligonucleotide
aayaaycayaaycay

SEQ ID NO: 3016 - DNA, 18 bp, Artificial Sequence
  Description of Artificial Sequence: Synthetic oligonucleotide
aayaayaayaayaaycay

SEQ ID NO: 3017 - DNA, 18 bp, Artificial Sequence
  Description of Artificial Sequence: Synthetic oligonucleotide
cayaayaayaayaayaay

SEQ ID NO: 3018 - DNA, 18 bp, Artificial Sequence
  Description of Artificial Sequence: Synthetic oligonucleotide
aaycayaayaayaayaay

SEQ ID NO: 3019 - DNA, 18 bp, Artificial Sequence
  Description of Artificial Sequence: Synthetic oligonucleotide
aayaaycayaayaayaay

SEQ ID NO: 3020 - DNA, 18 bp, Artificial Sequence
  Description of Artificial Sequence: Synthetic oligonucleotide
aayaayaaycayaayaay

SEQ ID NO: 3021 - DNA, 18 bp, Artificial Sequence
  Description of Artificial Sequence: Synthetic oligonucleotide
aayaayaayaaycayaay

SEQ ID NO: 3022 - DNA, 18 bp, Artificial Sequence
  Description of Artificial Sequence: Synthetic oligonucleotide
aayaayaayaaycaycay

SEQ ID NO: 3023 - DNA, 18 bp, Artificial Sequence
  Description of Artificial Sequence: Synthetic oligonucleotide
caycayaayaayaayaay

SEQ ID NO: 3024 - DNA, 18 bp, Artificial Sequence
  Description of Artificial Sequence: Synthetic oligonucleotide
cayaaycayaayaayaay

SEQ ID NO: 3025 - DNA, 18 bp, Artificial Sequence
  Description of Artificial Sequence: Synthetic oligonucleotide
cayaayaaycayaayaay

SEQ ID NO: 3026 - DNA, 18 bp, Artificial Sequence
  Description of Artificial Sequence: Synthetic oligonucleotide
cayaayaayaaycayaay

SEQ ID NO: 3027 - DNA, 18 bp, Artificial Sequence
  Description of Artificial Sequence: Synthetic oligonucleotide
cayaayaayaayaaycay

SEQ ID NO: 3028 - DNA, 18 bp, Artificial Sequence
  Description of Artificial Sequence: Synthetic oligonucleotide
aaycaycayaayaayaay

SEQ ID NO: 3029 - DNA, 18 bp, Artificial Sequence
  Description of Artificial Sequence: Synthetic oligonucleotide
aaycayaaycayaayaay

SEQ ID NO: 3030 - DNA, 18 bp, Artificial Sequence
  Description of Artificial Sequence: Synthetic oligonucleotide
aaycayaayaaycayaay

SEQ ID NO: 3031 - DNA, 18 bp, Artificial Sequence
  Description of Artificial Sequence: Synthetic oligonucleotide
aaycayaayaayaaycay

SEQ ID NO: 3032 - DNA, 18 bp, Artificial Sequence
  Description of Artificial Sequence: Synthetic oligonucleotide
aayaaycaycayaayaay

SEQ ID NO: 3033 - DNA, 18 bp, Artificial Sequence
  Description of Artificial Sequence: Synthetic oligonucleotide
aayaaycayaaycayaay

SEQ ID NO: 3034 - DNA, 18 bp, Artificial Sequence
  Description of Artificial Sequence: Synthetic oligonucleotide
aayaaycayaayaaycay

SEQ ID NO: 3035 - DNA, 18 bp, Artificial Sequence
  Description of Artificial Sequence: Synthetic oligonucleotide
aayaayaaycaycayaay

SEQ ID NO: 3036 - DNA, 18 bp, Artificial Sequence
  Description of Artificial Sequence: Synthetic oligonucleotide
aayaayaaycayaaycay

SEQ ID NO: 3037 - DNA, 21 bp, Artificial Sequence
  Description of Artificial Sequence: Synthetic oligonucleotide
aayaayaayaaycaycaycay

SEQ ID NO: 3038 - DNA, 21 bp, Artificial Sequence
  Description of Artificial Sequence: Synthetic oligonucleotide
caycaycayaayaayaayaay

SEQ ID NO: 3039 - DNA, 21 bp, Artificial Sequence
  Description of Artificial Sequence: Synthetic oligonucleotide
cayaaycaycayaayaayaay

SEQ ID NO: 3040 - DNA, 21 bp, Artificial Sequence
  Description of Artificial Sequence: Synthetic oligonucleotide
cayaaycayaaycayaayaay

SEQ ID NO: 3041 - DNA, 21 bp, Artificial Sequence
  Description of Artificial Sequence: Synthetic oligonucleotide
cayaaycayaayaaycayaay

SEQ ID NO: 3042 - DNA, 21 bp, Artificial Sequence
  Description of Artificial Sequence: Synthetic oligonucleotide
cayaaycayaayaayaaycay

SEQ ID NO: 3043 - DNA, 21 bp, Artificial Sequence
  Description of Artificial Sequence: Synthetic oligonucleotide
cayaayaaycaycayaayaay

SEQ ID NO: 3044 - DNA, 21 bp, Artificial Sequence
  Description of Artificial Sequence: Synthetic oligonucleotide
cayaayaaycayaaycayaay

SEQ ID NO: 3045 - DNA, 21 bp, Artificial Sequence
  Description of Artificial Sequence: Synthetic oligonucleotide
cayaayaaycayaayaaycay

SEQ ID NO: 3046 - DNA, 21 bp, Artificial Sequence
  Description of Artificial Sequence: Synthetic oligonucleotide
cayaayaayaaycayaaycay

SEQ ID NO: 3047 - DNA, 21 bp, Artificial Sequence
  Description of Artificial Sequence: Synthetic oligonucleotide
cayaayaayaaycaycayaay

SEQ ID NO: 3048 - DNA, 21 bp, Artificial Sequence
  Description of Artificial Sequence: Synthetic oligonucleotide
cayaayaayaayaaycaycay

SEQ ID NO: 3049 - DNA, 21 bp, Artificial Sequence
  Description of Artificial Sequence: Synthetic oligonucleotide
caycayaaycayaayaayaay

SEQ ID NO: 3050 - DNA, 21 bp, Artificial Sequence
  Description of Artificial Sequence: Synthetic oligonucleotide
caycayaayaaycayaayaay

SEQ ID NO: 3051 - DNA, 21 bp, Artificial Sequence
  Description of Artificial Sequence: Synthetic oligonucleotide
caycayaayaayaaycayaay

SEQ ID NO: 3052 - DNA, 21 bp, Artificial Sequence
  Description of Artificial Sequence: Synthetic oligonucleotide
caycayaayaayaayaaycay

SEQ ID NO: 3053 - DNA, 21 bp, Artificial Sequence
  Description of Artificial Sequence: Synthetic oligonucleotide
aaycaycaycayaayaayaay

SEQ ID NO: 3054 - DNA, 21 bp, Artificial Sequence
  Description of Artificial Sequence: Synthetic oligonucleotide
aaycaycayaaycayaayaay

SEQ ID NO: 3055 - DNA, 21 bp, Artificial Sequence
  Description of Artificial Sequence: Synthetic oligonucleotide
aaycaycayaayaaycayaay

SEQ ID NO: 3056 - DNA, 21 bp, Artificial Sequence
  Description of Artificial Sequence: Synthetic oligonucleotide
aaycaycayaayaayaaycay

SEQ ID NO: 3057 - DNA, 21 bp, Artificial Sequence
  Description of Artificial Sequence: Synthetic oligonucleotide
aaycayaaycaycayaayaay

SEQ ID NO: 3058 - DNA, 21 bp, Artificial Sequence
  Description of Artificial Sequence: Synthetic oligonucleotide
aaycayaayaaycaycayaay

SEQ ID NO: 3059 - DNA, 21 bp, Artificial Sequence
  Description of Artificial Sequence: Synthetic oligonucleotide
aaycayaayaayaaycaycay

SEQ ID NO: 3060 - DNA, 21 bp, Artificial Sequence
  Description of Artificial Sequence: Synthetic oligonucleotide
aaycayaaycayaaycayaay

SEQ ID NO: 3061 - DNA, 21 bp, Artificial Sequence
  Description of Artificial Sequence: Synthetic oligonucleotide
aaycayaaycayaayaaycay

SEQ ID NO: 3062 - DNA, 21 bp, Artificial Sequence
  Description of Artificial Sequence: Synthetic oligonucleotide
aaycayaayaaycayaaycay

SEQ ID NO: 3063 - DNA, 21 bp, Artificial Sequence
  Description of Artificial Sequence: Synthetic oligonucleotide
aayaaycaycaycayaayaay

SEQ ID NO: 3064 - DNA, 21 bp, Artificial Sequence
  Description of Artificial Sequence: Synthetic oligonucleotide
aayaaycaycayaaycayaay

SEQ ID NO: 3065 - DNA, 21 bp, Artificial Sequence
  Description of Artificial Sequence: Synthetic oligonucleotide
aayaaycaycayaayaaycay

SEQ ID NO: 3066 - DNA, 21 bp, Artificial Sequence
  Description of Artificial Sequence: Synthetic oligonucleotide
aayaaycayaaycaycayaay

SEQ ID NO: 3067 - DNA, 21 bp, Artificial Sequence
  Description of Artificial Sequence: Synthetic oligonucleotide
aayaaycayaaycayaaycay

SEQ ID NO: 3068 - DNA, 21 bp, Artificial Sequence
  Description of Artificial Sequence: Synthetic oligonucleotide
aayaaycayaayaaycaycay

SEQ ID NO: 3069 - DNA, 21 bp, Artificial Sequence
  Description of Artificial Sequence: Synthetic oligonucleotide
aayaayaaycaycaycayaay

SEQ ID NO: 3070 - DNA, 21 bp, Artificial Sequence
  Description of Artificial Sequence: Synthetic oligonucleotide
aayaayaaycaycayaaycay

SEQ ID NO: 3071 - DNA, 21 bp, Artificial Sequence
  Description of Artificial Sequence: Synthetic oligonucleotide
aayaayaaycayaaycaycay

SEQ ID NO: 3072 - DNA, 21 bp, Artificial Sequence
  Description of Artificial Sequence: Synthetic oligonucleotide
aayaayaayaayaaycaycay

SEQ ID NO: 3073 - DNA, 21 bp, Artificial Sequence
  Description of Artificial Sequence: Synthetic oligonucleotide
caycayaayaayaayaayaay

SEQ ID NO: 3074 - DNA, 21 bp, Artificial Sequence
  Description of Artificial Sequence: Synthetic oligonucleotide
cayaaycayaayaayaayaay

SEQ ID NO: 3075 - DNA, 21 bp, Artificial Sequence
  Description of Artificial Sequence: Synthetic oligonucleotide
cayaayaaycayaayaayaay

SEQ ID NO: 3076 - DNA, 21 bp, Artificial Sequence
  Description of Artificial Sequence: Synthetic oligonucleotide
cayaayaayaaycayaayaay

SEQ ID NO: 3077 - DNA, 21 bp, Artificial Sequence
  Description of Artificial Sequence: Synthetic oligonucleotide
cayaayaayaayaaycayaay

SEQ ID NO: 3078 - DNA, 21 bp, Artificial Sequence
  Description of Artificial Sequence: Synthetic oligonucleotide
cayaayaayaayaayaaycay

SEQ ID NO: 3079 - DNA, 21 bp, Artificial Sequence
  Description of Artificial Sequence: Synthetic oligonucleotide
aaycaycayaayaayaayaay

SEQ ID NO: 3080 - DNA, 21 bp, Artificial Sequence
  Description of Artificial Sequence: Synthetic oligonucleotide
aaycayaaycayaayaayaay

SEQ ID NO: 3081 - DNA, 21 bp, Artificial Sequence
  Description of Artificial Sequence: Synthetic oligonucleotide
aaycayaayaaycayaayaay

SEQ ID NO: 3082 - DNA, 21 bp, Artificial Sequence
  Description of Artificial Sequence: Synthetic oligonucleotide
aaycayaayaayaaycayaay

SEQ ID NO: 3083 - DNA, 21 bp, Artificial Sequence
  Description of Artificial Sequence: Synthetic oligonucleotide
aaycayaayaayaayaaycay

SEQ ID NO: 3084 - DNA, 21 bp, Artificial Sequence
  Description of Artificial Sequence: Synthetic oligonucleotide
aayaaycaycayaayaayaay

SEQ ID NO: 3085 - DNA, 21 bp, Artificial Sequence
  Description of Artificial Sequence: Synthetic oligonucleotide
aayaaycayaaycayaayaay

SEQ ID NO: 3086 - DNA, 21 bp, Artificial Sequence
  Description of Artificial Sequence: Synthetic oligonucleotide
aayaaycayaayaaycayaay

SEQ ID NO: 3087 - DNA, 21 bp, Artificial Sequence
  Description of Artificial Sequence: Synthetic oligonucleotide
aayaaycayaayaayaaycay

SEQ ID NO: 3088 - DNA, 21 bp, Artificial Sequence
  Description of Artificial Sequence: Synthetic oligonucleotide
aayaayaaycaycayaayaay

SEQ ID NO: 3089 - DNA, 21 bp, Artificial Sequence
  Description of Artificial Sequence: Synthetic oligonucleotide
aayaayaaycayaaycayaay

SEQ ID NO: 3090 - DNA, 21 bp, Artificial Sequence
  Description of Artificial Sequence: Synthetic oligonucleotide
aayaayaaycayaayaaycay

SEQ ID NO: 3091 - DNA, 21 bp, Artificial Sequence
  Description of Artificial Sequence: Synthetic oligonucleotide
aayaayaayaaycaycayaay

SEQ ID NO: 3092 - DNA, 21 bp, Artificial Sequence
  Description of Artificial Sequence: Synthetic oligonucleotide
aayaayaayaaycayaaycay

SEQ ID NO: 3093 - DNA, 21 bp, Artificial Sequence
  Description of Artificial Sequence: Synthetic oligonucleotide
aayaayaayaayaayaaycay

SEQ ID NO: 3094 - DNA, 21 bp, Artificial Sequence
  Description of Artificial Sequence: Synthetic oligonucleotide
cayaayaayaayaayaayaay

SEQ ID NO: 3095 - DNA, 21 bp, Artificial Sequence
  Description of Artificial Sequence: Synthetic oligonucleotide
aaycayaayaayaayaayaay

SEQ ID NO: 3096 - DNA, 21 bp, Artificial Sequence
  Description of Artificial Sequence: Synthetic oligonucleotide
aayaaycayaayaayaayaay

SEQ ID NO: 3097 - DNA, 21 bp, Artificial Sequence
  Description of Artificial Sequence: Synthetic oligonucleotide
aayaayaaycayaayaayaay

SEQ ID NO: 3098 - DNA, 21 bp, Artificial Sequence
  Description of Artificial Sequence: Synthetic oligonucleotide
aayaayaayaaycayaayaay

SEQ ID NO: 3099 - DNA, 21 bp, Artificial Sequence
  Description of Artificial Sequence: Synthetic oligonucleotide
aayaayaayaayaaycayaay

SEQ ID NO: 3100 - DNA, 12 bp, Artificial Sequence
  Description of Artificial Sequence: Synthetic oligonucleotide
aayaayaaygay

SEQ ID NO: 3101 - DNA, 12 bp, Artificial Sequence
  Description of Artificial Sequence: Synthetic oligonucleotide
gayaayaayaay

SEQ ID NO: 3102 - DNA, 12 bp, Artificial Sequence
  Description of Artificial Sequence: Synthetic oligonucleotide
aaygayaayaay

SEQ ID NO: 3103 - DNA, 12 bp, Artificial Sequence
  Description of Artificial Sequence: Synthetic oligonucleotide
aayaaygayaay

SEQ ID NO: 3104 - DNA, 15 bp, Artificial Sequence
  Description of Artificial Sequence: Synthetic oligonucleotide
aayaayaayaaygay

SEQ ID NO: 3105 - DNA, 15 bp, Artificial Sequence
  Description of Artificial Sequence: Synthetic oligonucleotide
gayaayaayaayaay

SEQ ID NO: 3106 - DNA, 15 bp, Artificial Sequence
  Description of Artificial Sequence: Synthetic oligonucleotide
aaygayaayaayaay

SEQ ID NO: 3107 - DNA, 15 bp, Artificial Sequence
  Description of Artificial Sequence: Synthetic oligonucleotide
aayaaygayaayaay

SEQ ID NO: 3108 - DNA, 15 bp, Artificial Sequence
  Description of Artificial Sequence: Synthetic oligonucleotide
aayaayaaygayaay

SEQ ID NO: 3109 - DNA, 15 bp, Artificial Sequence
  Description of Artificial Sequence: Synthetic oligonucleotide
aayaayaaygaygay

SEQ ID NO: 3110 - DNA, 15 bp, Artificial Sequence
  Description of Artificial Sequence: Synthetic oligonucleotide
gaygayaayaayaay

SEQ ID NO: 3111 - DNA, 15 bp, Artificial Sequence
  Description of Artificial Sequence: Synthetic oligonucleotide
gayaaygayaayaay

SEQ ID NO: 3112 - DNA, 15 bp, Artificial Sequence
  Description of Artificial Sequence: Synthetic oligonucleotide
gayaayaaygayaay

SEQ ID NO: 3113 - DNA, 15 bp, Artificial Sequence
  Description of Artificial Sequence: Synthetic oligonucleotide
gayaayaayaaygay

SEQ ID NO: 3114 - DNA, 15 bp, Artificial Sequence
  Description of Artificial Sequence: Synthetic oligonucleotide
aaygaygayaayaay

SEQ ID NO: 3115 - DNA, 15 bp, Artificial Sequence
  Description of Artificial Sequence: Synthetic oligonucleotide
aaygayaaygayaay

SEQ ID NO: 3116 - DNA, 15 bp, Artificial Sequence
  Description of Artificial Sequence: Synthetic oligonucleotide
aaygayaayaaygay

SEQ ID NO: 3117 - DNA, 15 bp, Artificial Sequence
  Description of Artificial Sequence: Synthetic oligonucleotide
aayaaygaygayaay

SEQ ID NO: 3118 - DNA, 15 bp, Artificial Sequence
  Description of Artificial Sequence: Synthetic oligonucleotide
aayaaygayaaygay

SEQ ID NO: 3119 - DNA, 18 bp, Artificial Sequence
  Description of Artificial Sequence: Synthetic oligonucleotide
aayaayaayaayaaygay

SEQ ID NO: 3120 - DNA, 18 bp, Artificial Sequence
  Description of Artificial Sequence: Synthetic oligonucleotide
gayaayaayaayaayaay

SEQ ID NO: 3121 - DNA, 18 bp, Artificial Sequence
  Description of Artificial Sequence: Synthetic oligonucleotide
aaygayaayaayaayaay

SEQ ID NO: 3122 - DNA, 18 bp, Artificial Sequence
  Description of Artificial Sequence: Synthetic oligonucleotide
aayaaygayaayaayaay

SEQ ID NO: 3123 - DNA, 18 bp, Artificial Sequence
  Description of Artificial Sequence: Synthetic oligonucleotide
aayaayaaygayaayaay

SEQ ID NO: 3124 - DNA, 18 bp, Artificial Sequence
  Description of Artificial Sequence: Synthetic oligonucleotide
aayaayaayaaygayaay

SEQ ID NO: 3125 - DNA, 18 bp, Artificial Sequence
  Description of Artificial Sequence: Synthetic oligonucleotide
aayaayaayaaygaygay

SEQ ID NO: 3126 - DNA, 18 bp, Artificial Sequence
  Description of Artificial Sequence: Synthetic oligonucleotide
gaygayaayaayaayaay

SEQ ID NO: 3127 - DNA, 18 bp, Artificial Sequence
  Description of Artificial Sequence: Synthetic oligonucleotide
gayaaygayaayaayaay

SEQ ID NO: 3128 - DNA, 18 bp, Artificial Sequence
  Description of Artificial Sequence: Synthetic oligonucleotide
gayaayaaygayaayaay

SEQ ID NO: 3129 - DNA, 18 bp, Artificial Sequence
  Description of Artificial Sequence: Synthetic oligonucleotide
gayaayaayaaygayaay

SEQ ID NO: 3130 - DNA, 18 bp, Artificial Sequence
  Description of Artificial Sequence: Synthetic oligonucleotide
gayaayaayaayaaygay

SEQ ID NO: 3131 - DNA, 18 bp, Artificial Sequence
  Description of Artificial Sequence: Synthetic oligonucleotide
aaygaygayaayaayaay

SEQ ID NO: 3132 - DNA, 18 bp, Artificial Sequence
  Description of Artificial Sequence: Synthetic oligonucleotide
aaygayaaygayaayaay

SEQ ID NO: 3133 - DNA, 18 bp, Artificial Sequence
  Description of Artificial Sequence: Synthetic oligonucleotide
aaygayaayaaygayaay

SEQ ID NO: 3134 - DNA, 18 bp, Artificial Sequence
  Description of Artificial Sequence: Synthetic oligonucleotide
aaygayaayaayaaygay

SEQ ID NO: 3135 - DNA, 18 bp, Artificial Sequence
  Description of Artificial Sequence: Synthetic oligonucleotide
aayaaygaygayaayaay

SEQ ID NO: 3136 - DNA, 18 bp, Artificial Sequence
  Description of Artificial Sequence: Synthetic oligonucleotide
aayaaygayaaygayaay

SEQ ID NO: 3137 - DNA, 18 bp, Artificial Sequence
  Description of Artificial Sequence: Synthetic oligonucleotide
aayaaygayaayaaygay

SEQ ID NO: 3138 - DNA, 18 bp, Artificial Sequence
  Description of Artificial Sequence: Synthetic oligonucleotide
aayaayaaygaygayaay

SEQ ID NO: 3139 - DNA, 18 bp, Artificial Sequence
  Description of Artificial Sequence: Synthetic oligonucleotide
aayaayaaygayaaygay

SEQ ID NO: 3140 - DNA, 21 bp, Artificial Sequence
  Description of Artificial Sequence: Synthetic oligonucleotide
aayaayaayaaygaygaygay

SEQ ID NO: 3141 - DNA, 21 bp, Artificial Sequence
  Description of Artificial Sequence: Synthetic oligonucleotide
gaygaygayaayaayaayaay

SEQ ID NO: 3142 - DNA, 21 bp, Artificial Sequence
  Description of Artificial Sequence: Synthetic oligonucleotide
gayaaygaygayaayaayaay

SEQ ID NO: 3143 - DNA, 21 bp, Artificial Sequence
  Description of Artificial Sequence: Synthetic oligonucleotide
gayaaygayaaygayaayaay

SEQ ID NO: 3144 - DNA, 21 bp, Artificial Sequence
  Description of Artificial Sequence: Synthetic oligonucleotide
gayaaygayaayaaygayaay

SEQ ID NO: 3145 - DNA, 21 bp, Artificial Sequence
  Description of Artificial Sequence: Synthetic oligonucleotide
gayaaygayaayaayaaygay

SEQ ID NO: 3146 - DNA, 21 bp, Artificial Sequence
  Description of Artificial Sequence: Synthetic oligonucleotide
gayaayaaygaygayaayaay

SEQ ID NO: 3147 - DNA, 21 bp, Artificial Sequence
  Description of Artificial Sequence: Synthetic oligonucleotide
gayaayaaygayaaygayaay

SEQ ID NO: 3148 - DNA, 21 bp, Artificial Sequence
  Description of Artificial Sequence: Synthetic oligonucleotide
gayaayaaygayaayaaygay

SEQ ID NO: 3149 - DNA, 21 bp, Artificial Sequence
  Description of Artificial Sequence: Synthetic oligonucleotide
gayaayaayaaygayaaygay

SEQ ID NO: 3150 - DNA, 21 bp, Artificial Sequence
  Description of Artificial Sequence: Synthetic oligonucleotide
gayaayaayaaygaygayaay

SEQ ID NO: 3151 - DNA, 21 bp, Artificial Sequence
  Description of Artificial Sequence: Synthetic oligonucleotide
gayaayaayaayaaygaygay

SEQ ID NO: 3152 - DNA, 21 bp, Artificial Sequence
  Description of Artificial Sequence: Synthetic oligonucleotide
gaygayaaygayaayaayaay

SEQ ID NO: 3153 - DNA, 21 bp, Artificial Sequence
  Description of Artificial Sequence: Synthetic oligonucleotide
gaygayaayaaygayaayaay

SEQ ID NO: 3154 - DNA, 21 bp, Artificial Sequence
  Description of Artificial Sequence: Synthetic oligonucleotide
gaygayaayaayaaygayaay

SEQ ID NO: 3155 - DNA, 21 bp, Artificial Sequence
  Description of Artificial Sequence: Synthetic oligonucleotide
gaygayaayaayaayaaygay

SEQ ID NO: 3156 - DNA, 21 bp, Artificial Sequence
  Description of Artificial Sequence: Synthetic oligonucleotide
aaygaygaygayaayaayaay

SEQ ID NO: 3157 - DNA, 21 bp, Artificial Sequence
  Description of Artificial Sequence: Synthetic oligonucleotide
aaygaygayaaygayaayaay

SEQ ID NO: 3158 - DNA, 21 bp, Artificial Sequence
  Description of Artificial Sequence: Synthetic oligonucleotide
aaygaygayaayaaygayaay

SEQ ID NO: 3159 - DNA, 21 bp, Artificial Sequence
  Description of Artificial Sequence: Synthetic oligonucleotide
aaygaygayaayaayaaygay

SEQ ID NO: 3160 - DNA, 21 bp, Artificial Sequence
  Description of Artificial Sequence: Synthetic oligonucleotide
aaygayaaygaygayaayaay

SEQ ID NO: 3161 - DNA, 21 bp, Artificial Sequence
  Description of Artificial Sequence: Synthetic oligonucleotide
aaygayaayaaygaygayaay

SEQ ID NO: 3162 - DNA, 21 bp, Artificial Sequence
  Description of Artificial Sequence: Synthetic oligonucleotide
aaygayaayaayaaygaygay

SEQ ID NO: 3163 - DNA, 21 bp, Artificial Sequence
  Description of Artificial Sequence: Synthetic oligonucleotide
aaygayaaygayaaygayaay

SEQ ID NO: 3164 - DNA, 21 bp, Artificial Sequence
  Description of Artificial Sequence: Synthetic oligonucleotide
aaygayaaygayaayaaygay

SEQ ID NO: 3165 - DNA, 21 bp, Artificial Sequence
  Description of Artificial Sequence: Synthetic oligonucleotide
aaygayaayaaygayaaygay

SEQ ID NO: 3166 - DNA, 21 bp, Artificial Sequence
  Description of Artificial Sequence: Synthetic oligonucleotide
aayaaygaygaygayaayaay

SEQ ID NO: 3167 - DNA, 21 bp, Artificial Sequence
  Description of Artificial Sequence: Synthetic oligonucleotide
aayaaygaygayaaygayaay

SEQ ID NO: 3168 - DNA, 21 bp, Artificial Sequence
  Description of Artificial Sequence: Synthetic oligonucleotide
aayaaygaygayaayaaygay

SEQ ID NO: 3169 - DNA, 21 bp, Artificial Sequence
  Description of Artificial Sequence: Synthetic oligonucleotide
aayaaygayaaygaygayaay

SEQ ID NO: 3170 - DNA, 21 bp, Artificial Sequence
  Description of Artificial Sequence: Synthetic oligonucleotide
aayaaygayaaygayaaygay

SEQ ID NO: 3171 - DNA, 21 bp, Artificial Sequence
  Description of Artificial Sequence: Synthetic oligonucleotide
aayaaygayaayaaygaygay

SEQ ID NO: 3172 - DNA, 21 bp, Artificial Sequence
  Description of Artificial Sequence: Synthetic oligonucleotide
aayaayaaygaygaygayaay

SEQ ID NO: 3173 - DNA, 21 bp, Artificial Sequence
  Description of Artificial Sequence: Synthetic oligonucleotide
aayaayaaygaygayaaygay

SEQ ID NO: 3174 - DNA, 21 bp, Artificial Sequence
  Description of Artificial Sequence: Synthetic oligonucleotide
aayaayaaygayaaygaygay

SEQ ID NO: 3175 - DNA, 21 bp, Artificial Sequence
  Description of Artificial Sequence: Synthetic oligonucleotide
aayaayaayaayaaygaygay

SEQ ID NO: 3176 - DNA, 21 bp, Artificial Sequence
  Description of Artificial Sequence: Synthetic oligonucleotide
gaygayaayaayaayaayaay

SEQ ID NO: 3177 - DNA, 21 bp, Artificial Sequence
  Description of Artificial Sequence: Synthetic oligonucleotide
gayaaygayaayaayaayaay

SEQ ID NO: 3178 - DNA, 21 bp, Artificial Sequence
  Description of Artificial Sequence: Synthetic oligonucleotide
gayaayaaygayaayaayaay

SEQ ID NO: 3179 - DNA, 21 bp, Artificial Sequence
  Description of Artificial Sequence: Synthetic oligonucleotide
gayaayaayaaygayaayaay

SEQ ID NO: 3180 - DNA, 21 bp, Artificial Sequence
  Description of Artificial Sequence: Synthetic oligonucleotide
gayaayaayaayaaygayaay

SEQ ID NO: 3181 - DNA, 21 bp, Artificial Sequence
  Description of Artificial Sequence: Synthetic oligonucleotide
gayaayaayaayaayaaygay

SEQ ID NO: 3182 - DNA, 21 bp, Artificial Sequence
  Description of Artificial Sequence: Synthetic oligonucleotide
aaygaygayaayaayaayaay

SEQ ID NO: 3183 - DNA, 21 bp, Artificial Sequence
  Description of Artificial Sequence: Synthetic oligonucleotide
aaygayaaygayaayaayaay

SEQ ID NO: 3184 - DNA, 21 bp, Artificial Sequence
  Description of Artificial Sequence: Synthetic oligonucleotide
aaygayaayaaygayaayaay

SEQ ID NO: 3185 - DNA, 21 bp, Artificial Sequence
  Description of Artificial Sequence: Synthetic oligonucleotide
aaygayaayaayaaygayaay

SEQ ID NO: 3186 - DNA, 21 bp, Artificial Sequence
  Description of Artificial Sequence: Synthetic oligonucleotide
aaygayaayaayaayaaygay

SEQ ID NO: 3187 - DNA, 21 bp, Artificial Sequence
  Description of Artificial Sequence: Synthetic oligonucleotide
aayaaygaygayaayaayaay

SEQ ID NO: 3188 - DNA, 21 bp, Artificial Sequence
  Description of Artificial Sequence: Synthetic oligonucleotide
aayaaygayaaygayaayaay

SEQ ID NO: 3189 - DNA, 21 bp, Artificial Sequence
  Description of Artificial Sequence: Synthetic oligonucleotide
aayaaygayaayaaygayaay

SEQ ID NO: 3190 - DNA, 21 bp, Artificial Sequence
  Description of Artificial Sequence: Synthetic oligonucleotide
aayaaygayaayaayaaygay

SEQ ID NO: 3191 - DNA, 21 bp, Artificial Sequence
  Description of Artificial Sequence: Synthetic oligonucleotide
aayaayaaygaygayaayaay

SEQ ID NO: 3192 - DNA, 21 bp, Artificial Sequence
  Description of Artificial Sequence: Synthetic oligonucleotide
aayaayaaygayaaygayaay

SEQ ID NO: 3193 - DNA, 21 bp, Artificial Sequence
  Description of Artificial Sequence: Synthetic oligonucleotide
aayaayaaygayaayaaygay

SEQ ID NO: 3194 - DNA, 21 bp, Artificial Sequence
  Description of Artificial Sequence: Synthetic oligonucleotide
aayaayaayaaygaygayaay

SEQ ID NO: 3195 - DNA, 21 bp, Artificial Sequence
  Description of Artificial Sequence: Synthetic oligonucleotide
aayaayaayaaygayaaygay

SEQ ID NO: 3196 - DNA, 21 bp, Artificial Sequence
  Description of Artificial Sequence: Synthetic oligonucleotide
aayaayaayaayaayaaygay

SEQ ID NO: 3197 - DNA, 21 bp, Artificial Sequence
  Description of Artificial Sequence: Synthetic oligonucleotide
gayaayaayaayaayaayaay

SEQ ID NO: 3198 - DNA, 21 bp, Artificial Sequence
  Description of Artificial Sequence: Synthetic oligonucleotide
aaygayaayaayaayaayaay

SEQ ID NO: 3199 - DNA, 21 bp, Artificial Sequence
  Description of Artificial Sequence: Synthetic oligonucleotide
aayaaygayaayaayaayaay

SEQ ID NO: 3200 - DNA, 21 bp, Artificial Sequence
  Description of Artificial Sequence: Synthetic oligonucleotide
aayaayaaygayaayaayaay

SEQ ID NO: 3201 - DNA, 21 bp, Artificial Sequence
  Description of Artificial Sequence: Synthetic oligonucleotide
aayaayaayaaygayaayaay

SEQ ID NO: 3202 - DNA, 21 bp, Artificial Sequence
  Description of Artificial Sequence: Synthetic oligonucleotide
aayaayaayaayaaygayaay

SEQ ID NO: 3203 - DNA, 12 bp, Artificial Sequence
  Description of Artificial Sequence: Synthetic oligonucleotide
  modified_base (3)..(3): a, c, g, t, unknown or other
  modified_base (6)..(6): a, c, g, t, unknown or other
  modified_base (9)..(9): a, c, g, t, unknown or other
  modified_base (12)..(12): a, c, g, t, unknown or other
ggnggnggnacn

SEQ ID NO: 3204 - DNA, 12 bp, Artificial Sequence
  Description of Artificial Sequence: Synthetic oligonucleotide
  modified_base (3)..(3): a, c, g, t, unknown or other
  modified_base (6)..(6): a, c, g, t, unknown or other
  modified_base (9)..(9): a, c, g, t, unknown or other
  modified_base (12)..(12): a, c, g, t, unknown or other
acnggnggnggn

SEQ ID NO: 3205 - DNA, 12 bp, Artificial Sequence
  Description of Artificial Sequence: Synthetic oligonucleotide
  modified_base (3)..(3): a, c, g, t, unknown or other
  modified_base (6)..(6): a, c, g, t, unknown or other
  modified_base (9)..(9): a, c, g, t, unknown or other
  modified_base (12)..(12): a, c, g, t, unknown or other
ggnacnggnggn

SEQ ID NO: 3206 - DNA, 12 bp, Artificial Sequence
  Description of Artificial Sequence: Synthetic oligonucleotide
  modified_base (3)..(3): a, c, g, t, unknown or other
  modified_base (6)..(6): a, c, g, t, unknown or other
  modified_base (9)..(9): a, c, g, t, unknown or other
  modified_base (12)..(12): a, c, g, t, unknown or other
ggnggnacnggn

SEQ ID NO: 3207 - DNA, 15 bp, Artificial Sequence
  Description of Artificial Sequence: Synthetic oligonucleotide
  modified_base (3)..(3): a, c, g, t, unknown or other
  modified_base (6)..(6): a, c, g, t, unknown or other
  modified_base (9)..(9): a, c, g, t, unknown or other
  modified_base (12)..(12): a, c, g, t, unknown or other
  modified_base (15)..(15): a, c, g, t, unknown or other
ggnggnggnggnacn

SEQ ID NO: 3208 - DNA, 15 bp, Artificial Sequence
  Description of Artificial Sequence: Synthetic oligonucleotide
  modified_base (3)..(3): a, c, g, t, unknown or other
  modified_base (6)..(6): a, c, g, t, unknown or other
  modified_base (9)..(9): a, c, g, t, unknown or other
  modified_base (12)..(12): a, c, g, t, unknown or other
  modified_base (15)..(15): a, c, g, t, unknown or other
acnggnggnggnggn

SEQ ID NO: 3209 - DNA, 15 bp, Artificial Sequence
  Description of Artificial Sequence: Synthetic oligonucleotide
  modified_base (3)..(3): a, c, g, t, unknown or other
  modified_base (6)..(6): a, c, g, t, unknown or other
  modified_base (9)..(9): a, c, g, t, unknown or other
  modified_base (12)..(12): a, c, g, t, unknown or other
  modified_base (15)..(15): a, c, g, t, unknown or other
ggnacnggnggnggn

SEQ ID NO: 3210 - DNA, 15 bp, Artificial Sequence
  Description of Artificial Sequence: Synthetic oligonucleotide
  modified_base (3)..(3): a, c, g, t, unknown or other
  modified_base (6)..(6): a, c, g, t, unknown or other
  modified_base (9)..(9): a, c, g, t, unknown or other
  modified_base (12)..(12): a, c, g, t, unknown or other
  modified_base (15)..(15): a, c, g, t, unknown or other
ggnggnacnggnggn

SEQ ID NO: 3211 - DNA, 15 bp, Artificial Sequence
  Description of Artificial Sequence: Synthetic oligonucleotide
  modified_base (3)..(3): a, c, g, t, unknown or other
  modified_base (6)..(6): a, c, g, t, unknown or other
  modified_base (9)..(9): a, c, g, t, unknown or other
  modified_base (12)..(12): a, c, g, t, unknown or other
  modified_base (15)..(15): a, c, g, t, unknown or other
ggnggnggnacnggn

SEQ ID NO: 3212 - DNA, 15 bp, Artificial Sequence
  Description of Artificial Sequence: Synthetic oligonucleotide
  modified_base (3)..(3): a, c, g, t, unknown or other
  modified_base (6)..(6): a, c, g, t, unknown or other
  modified_base (9)..(9): a, c, g, t, unknown or other
  modified_base (12)..(12): a, c, g, t, unknown or other
  modified_base (15)..(15): a, c, g, t, unknown or other
ggnggnggnacnacn

SEQ ID NO: 3213 - DNA, 15 bp, Artificial Sequence
  Description of Artificial Sequence: Synthetic oligonucleotide
  modified_base (3)..(3): a, c, g, t, unknown or other
  modified_base (6)..(6): a, c, g, t, unknown or other
  modified_base (9)..(9): a, c, g, t, unknown or other
  modified_base (12)..(12): a, c, g, t, unknown or other
  modified_base (15)..(15): a, c, g, t, unknown or other
acnacnggnggnggn

SEQ ID NO: 3214 - DNA, 15 bp, Artificial Sequence
  Description of Artificial Sequence: Synthetic oligonucleotide
  modified_base (3)..(3): a, c, g, t, unknown or other
  modified_base (6)..(6): a, c, g, t, unknown or other
  modified_base (9)..(9): a, c, g, t, unknown or other
  modified_base (12)..(12): a, c, g, t, unknown or other
  modified_base (15)..(15): a, c, g, t, unknown or other
acnggnacnggnggn

SEQ ID NO: 3215 - DNA, 15 bp, Artificial Sequence
  Description of Artificial Sequence: Synthetic oligonucleotide
  modified_base (3)..(3): a, c, g, t, unknown or other
  modified_base (6)..(6): a, c, g, t, unknown or other
  modified_base (9)..(9): a, c, g, t, unknown or other
  modified_base (12)..(12): a, c, g, t, unknown or other
  modified_base (15)..(15): a, c, g, t, unknown or other
acnggnggnacnggn

SEQ ID NO: 3216 - DNA, 15 bp, Artificial Sequence
  Description of Artificial Sequence: Synthetic oligonucleotide
  modified_base (3)..(3): a, c, g, t, unknown or other
  modified_base (6)..(6): a, c, g, t, unknown or other
  modified_base (9)..(9): a, c, g, t, unknown or other
  modified_base (12)..(12): a, c, g, t, unknown or other
  modified_base (15)..(15): a, c, g, t, unknown or other
acnggnggnggnacn

SEQ ID NO: 3217 - DNA, 15 bp, Artificial Sequence
  Description of Artificial Sequence: Synthetic oligonucleotide
  modified_base (3)..(3): a, c, g, t, unknown or other
  modified_base (6)..(6): a, c, g, t, unknown or other
  modified_base (9)..(9): a, c, g, t, unknown or other
  modified_base (12)..(12): a, c, g, t, unknown or other
  modified_base (15)..(15): a, c, g, t, unknown or other
ggnacnacnggnggn

SEQ ID NO: 3218 - DNA, 15 bp, Artificial Sequence
  Description of Artificial Sequence: Synthetic oligonucleotide
  modified_base (3)..(3): a, c, g, t, unknown or other
  modified_base (6)..(6): a, c, g, t, unknown or other
  modified_base (9)..(9): a, c, g, t, unknown or other
  modified_base (12)..(12): a, c, g, t, unknown or other
  modified_base (15)..(15): a, c, g, t, unknown or other
ggnacnggnacnggn

SEQ ID NO: 3219 - DNA, 15 bp, Artificial Sequence
  Description of Artificial Sequence: Synthetic oligonucleotide
  modified_base (3)..(3): a, c, g, t, unknown or other
  modified_base (6)..(6): a, c, g, t, unknown or other
  modified_base (9)..(9): a, c, g, t, unknown or other
  modified_base (12)..(12): a, c, g, t, unknown or other
  modified_base (15)..(15): a, c, g, t, unknown or other
ggnacnggnggnacn

SEQ ID NO: 3220 - DNA, 15 bp, Artificial Sequence
  Description of Artificial Sequence: Synthetic oligonucleotide
  modified_base (3)..(3): a, c, g, t, unknown or other
  modified_base (6)..(6): a, c, g, t, unknown or other
  modified_base (9)..(9): a, c, g, t, unknown or other
  modified_base (12)..(12): a, c, g, t, unknown or other
  modified_base (15)..(15): a, c, g, t, unknown or other
ggnggnacnacnggn

SEQ ID NO: 3221 - DNA, 15 bp, Artificial Sequence
  Description of Artificial Sequence: Synthetic oligonucleotide
  modified_base (3)..(3): a, c, g, t, unknown or other
  modified_base (6)..(6): a, c, g, t, unknown or other
  modified_base (9)..(9): a, c, g, t, unknown or other
  modified_base (12)..(12): a, c, g, t, unknown or other
  modified_base (15)..(15): a, c, g, t, unknown or other
ggnggnacnggnacn

SEQ ID NO: 3222 - DNA, 18 bp, Artificial Sequence
  Description of Artificial Sequence: Synthetic oligonucleotide
  modified_base (3)..(3): a, c, g, t, unknown or other
  modified_base (6)..(6): a, c, g, t, unknown or other
  modified_base (9)..(9): a, c, g, t, unknown or other
  modified_base (12)..(12): a, c, g, t, unknown or other
  modified_base (15)..(15): a, c, g, t, unknown or other
  modified_base (18)..(18): a, c, g, t, unknown or other
ggnggnggnggnggnacn

SEQ ID NO: 3223 - DNA, 18 bp, Artificial Sequence
  Description of Artificial Sequence: Synthetic oligonucleotide
  modified_base (3)..(3): a, c, g, t, unknown or other
  modified_base (6)..(6): a, c, g, t, unknown or other
  modified_base (9)..(9): a, c, g, t, unknown or other
  modified_base (12)..(12): a, c, g, t, unknown or other
  modified_base (15)..(15): a, c, g, t, unknown or other
  modified_base (18)..(18): a, c, g, t, unknown or other
acnggnggnggnggnggn

SEQ ID NO: 3224 - DNA, 18 bp, Artificial Sequence
  Description of Artificial Sequence: Synthetic oligonucleotide
  modified_base (3)..(3): a, c, g, t, unknown or other
  modified_base (6)..(6): a, c, g, t, unknown or other
  modified_base (9)..(9): a, c, g, t, unknown or other
  modified_base (12)..(12): a, c, g, t, unknown or other
  modified_base (15)..(15): a, c, g, t, unknown or other
  modified_base (18)..(18): a, c, g, t, unknown or other
ggnacnggnggnggnggn

SEQ ID NO: 3225 - DNA, 18 bp, Artificial Sequence
  Description of Artificial Sequence: Synthetic oligonucleotide
  modified_base (3)..(3): a, c, g, t, unknown or other
  modified_base (6)..(6): a, c, g, t, unknown or other
  modified_base (9)..(9): a, c, g, t, unknown or other
  modified_base (12)..(12): a, c, g, t, unknown or other
  modified_base (15)..(15): a, c, g, t, unknown or other
  modified_base (18)..(18): a, c, g, t, unknown or other
ggnggnacnggnggnggn

SEQ ID NO: 3226 - DNA, 18 bp, Artificial Sequence
  Description of Artificial Sequence: Synthetic oligonucleotide
  modified_base (3)..(3): a, c, g, t, unknown or other
  modified_base (6)..(6): a, c, g, t, unknown or other
  modified_base (9)..(9): a, c, g, t, unknown or other
  modified_base (12)..(12): a, c, g, t, unknown or other
  modified_base (15)..(15): a, c, g, t, unknown or other
  modified_base (18)..(18): a, c, g, t, unknown or other
ggnggnggnacnggnggn

SEQ ID NO: 3227 - DNA, 18 bp, Artificial Sequence
  Description of Artificial Sequence: Synthetic oligonucleotide
  modified_base (3)..(3): a, c, g, t, unknown or other
  modified_base (6)..(6): a, c, g, t, unknown or other
  modified_base (9)..(9): a, c, g, t, unknown or other
  modified_base (12)..(12): a, c, g, t, unknown or other
  modified_base (15)..(15): a, c, g, t, unknown or other
  modified_base (18)..(18): a, c, g, t, unknown or other
ggnggnggnggnacnggn

SEQ ID NO: 3228 - DNA, 18 bp, Artificial Sequence
  Description of Artificial Sequence: Synthetic oligonucleotide
  modified_base (3)..(3): a, c, g, t, unknown or other
  modified_base (6)..(6): a, c, g, t, unknown or other
  modified_base (9)..(9): a, c, g, t, unknown or other
  modified_base (12)..(12): a, c, g, t, unknown or other
  modified_base (15)..(15): a, c, g, t, unknown or other
  modified_base (18)..(18): a, c, g, t, unknown or other
ggnggnggnggnacnacn

SEQ ID NO: 3229 - DNA, 18 bp, Artificial Sequence
  Description of Artificial Sequence: Synthetic oligonucleotide
  modified_base (3)..(3): a, c, g, t, unknown or other
  modified_base (6)..(6): a, c, g, t, unknown or other
  modified_base (9)..(9): a, c, g, t, unknown or other
  modified_base (12)..(12): a, c, g, t, unknown or other
  modified_base (15)..(15): a, c, g, t, unknown or other
  modified_base (18)..(18): a, c, g, t, unknown or other
acnacnggnggnggnggn

SEQ ID NO: 3230 - DNA, 18 bp, Artificial Sequence
  Description of Artificial Sequence: Synthetic oligonucleotide
  modified_base (3)..(3): a, c, g, t, unknown or other
  modified_base (6)..(6): a, c, g, t, unknown or other
  modified_base (9)..(9): a, c, g, t, unknown or other
  modified_base (12)..(12): a, c, g, t, unknown or other
  modified_base (15)..(15): a, c, g, t, unknown or other
  modified_base (18)..(18): a, c, g, t, unknown or other
acnggnacnggnggnggn

SEQ ID NO: 3231 - DNA, 18 bp, Artificial Sequence
  Description of Artificial Sequence: Synthetic oligonucleotide
  modified_base (3)..(3): a, c, g, t, unknown or other
  modified_base (6)..(6): a, c, g, t, unknown or other
  modified_base (9)..(9): a, c, g, t, unknown or other
  modified_base (12)..(12): a, c, g, t, unknown or other
  modified_base (15)..(15): a, c, g, t, unknown or other
  modified_base (18)..(18): a, c, g, t, unknown or other
acnggnggnacnggnggn

SEQ ID NO: 3232 - DNA, 18 bp, Artificial Sequence
  Description of Artificial Sequence: Synthetic oligonucleotide
  modified_base (3)..(3): a, c, g, t, unknown or other
  modified_base (6)..(6): a, c, g, t, unknown or other
  modified_base (9)..(9): a, c, g, t, unknown or other
  modified_base (12)..(12): a, c, g, t, unknown or other
  modified_base (15)..(15): a, c, g, t, unknown or other
  modified_base (18)..(18): a, c, g, t, unknown or other
acnggnggnggnacnggn

SEQ ID NO: 3233 - DNA, 18 bp, Artificial Sequence
  Description of Artificial Sequence: Synthetic oligonucleotide
  modified_base (3)..(3): a, c, g, t, unknown or other
  modified_base (6)..(6): a, c, g, t, unknown or other
  modified_base (9)..(9): a, c, g, t, unknown or other
  modified_base (12)..(12): a, c, g, t, unknown or other
  modified_base (15)..(15): a, c, g, t, unknown or other
  modified_base (18)..(18): a, c, g, t, unknown or other
acnggnggnggnggnacn

SEQ ID NO: 3234 - DNA, 18 bp, Artificial Sequence
  Description of Artificial Sequence: Synthetic oligonucleotide
  modified_base (3)..(3): a, c, g, t, unknown or other
  modified_base (6)..(6): a, c, g, t, unknown or other
  modified_base (9)..(9): a, c, g, t, unknown or other
  modified_base (12)..(12): a, c, g, t, unknown or other
  modified_base (15)..(15): a, c, g, t, unknown or other
  modified_base (18)..(18): a, c, g, t, unknown or other
ggnacnacnggnggnggn

SEQ ID NO: 3235 - DNA, 18 bp, Artificial Sequence
  Description of Artificial Sequence: Synthetic oligonucleotide
  modified_base (3)..(3): a, c, g, t, unknown or other
  modified_base (6)..(6): a, c, g, t, unknown or other
  modified_base (9)..(9): a, c, g, t, unknown or other
  modified_base (12)..(12): a, c, g, t, unknown or other
  modified_base (15)..(15): a, c, g, t, unknown or other
  modified_base (18)..(18): a, c, g, t, unknown or other
ggnacnggnacnggnggn

SEQ ID NO: 3236 - DNA, 18 bp, Artificial Sequence
  Description of Artificial Sequence: Synthetic oligonucleotide
  modified_base (3)..(3): a, c, g, t, unknown or other
  modified_base (6)..(6): a, c, g, t, unknown or other
  modified_base (9)..(9): a, c, g, t, unknown or other
  modified_base (12)..(12): a, c, g, t, unknown or other
  modified_base (15)..(15): a, c, g, t, unknown or other
  modified_base (18)..(18): a, c, g, t, unknown or other
ggnacnggnggnacnggn

SEQ ID NO: 3237 - DNA, 18 bp, Artificial Sequence
  Description of Artificial Sequence: Synthetic oligonucleotide
  modified_base (3)..(3): a, c, g, t, unknown or other
  modified_base (6)..(6): a, c, g, t, unknown or other
  modified_base (9)..(9): a, c, g, t, unknown or other
  modified_base (12)..(12): a, c, g, t, unknown or other
  modified_base (15)..(15): a, c, g, t, unknown or other
  modified_base (18)..(18): a, c, g, t, unknown or other
ggnacnggnggnggnacn

SEQ ID NO: 3238 - DNA, 18 bp, Artificial Sequence
  Description of Artificial Sequence: Synthetic oligonucleotide
  modified_base (3)..(3): a, c, g, t, unknown or other
  modified_base (6)..(6): a, c, g, t, unknown or other
  modified_base (9)..(9): a, c, g, t, unknown or other
  modified_base (12)..(12): a, c, g, t, unknown or other
  modified_base (15)..(15): a, c, g, t, unknown or other
  modified_base (18)..(18): a, c, g, t, unknown or other
ggnggnacnacnggnggn

SEQ ID NO: 3239 - DNA, 18 bp, Artificial Sequence
  Description of Artificial Sequence: Synthetic oligonucleotide
  modified_base (3)..(3): a, c, g, t, unknown or other
  modified_base (6)..(6): a, c, g, t, unknown or other
  modified_base (9)..(9): a, c, g, t, unknown or other
  modified_base (12)..(12): a, c, g, t, unknown or other
  modified_base (15)..(15): a, c, g, t, unknown or other
  modified_base (18)..(18): a, c, g, t, unknown or other
ggnggnacnggnacnggn

SEQ ID NO: 3240 - DNA, 18 bp, Artificial Sequence
  Description of Artificial Sequence: Synthetic oligonucleotide
  modified_base (3)..(3): a, c, g, t, unknown or other
  modified_base (6)..(6): a, c, g, t, unknown or other
  modified_base (9)..(9): a, c, g, t, unknown or other
  modified_base (12)..(12): a, c, g, t, unknown or other
  modified_base (15)..(15): a, c, g, t, unknown or other
  modified_base (18)..(18): a, c, g, t, unknown or other
ggnggnacnggnggnacn

SEQ ID NO: 3241 - DNA, 18 bp, Artificial Sequence
  Description of Artificial Sequence: Synthetic oligonucleotide
  modified_base (3)..(3): a, c, g, t, unknown or other
  modified_base (6)..(6): a, c, g, t, unknown or other
  modified_base (9)..(9): a, c, g, t, unknown or other
  modified_base (12)..(12): a, c, g, t, unknown or other
  modified_base (15)..(15): a, c, g, t, unknown or other
  modified_base (18)..(18): a, c, g, t, unknown or other
ggnggnggnacnacnggn

SEQ ID NO: 3242 - DNA, 18 bp, Artificial Sequence
  Description of Artificial Sequence: Synthetic oligonucleotide
  modified_base (3)..(3): a, c, g, t, unknown or other
  modified_base (6)..(6): a, c, g, t, unknown or other
  modified_base (9)..(9): a, c, g, t, unknown or other
  modified_base (12)..(12): a, c, g, t, unknown or other
  modified_base (15)..(15): a, c, g, t, unknown or other
  modified_base (18)..(18): a, c, g, t, unknown or other
ggnggnggnacnggnacn

SEQ ID NO: 3243 - DNA, 21 bp, Artificial Sequence
  Description of Artificial Sequence: Synthetic oligonucleotide
  modified_base (3)..(3): a, c, g, t, unknown or other
  modified_base (6)..(6): a, c, g, t, unknown or other
  modified_base (9)..(9): a, c, g, t, unknown or other
  modified_base (12)..(12): a, c, g, t, unknown or other
  modified_base (15)..(15): a, c, g, t, unknown or other
  modified_base (18)..(18): a, c, g, t, unknown or other
  modified_base (21)..(21): a, c, g, t, unknown or other
ggnggnggnggnacnacnacn

SEQ ID NO: 3244 - DNA, 21 bp, Artificial Sequence
  Description of Artificial Sequence: Synthetic oligonucleotide
  modified_base (3)..(3): a, c, g, t, unknown or other
  modified_base (6)..(6): a, c, g, t, unknown or other
  modified_base (9)..(9): a, c, g, t, unknown or other
  modified_base (12)..(12): a, c, g, t, unknown or other
  modified_base (15)..(15): a, c, g, t, unknown or other
  modified_base (18)..(18): a, c, g, t, unknown or other
  modified_base (21)..(21): a, c, g, t, unknown or other
acnacnacnggnggnggnggn

SEQ ID NO: 3245 - DNA, 21 bp, Artificial Sequence
  Description of Artificial Sequence: Synthetic oligonucleotide
  modified_base (3)..(3): a, c, g, t, unknown or other
  modified_base (6)..(6): a, c, g, t, unknown or other
  modified_base (9)..(9): a, c, g, t, unknown or other
  modified_base (12)..(12): a, c, g, t, unknown or other
  modified_base (15)..(15): a, c, g, t, unknown or other
  modified_base (18)..(18): a, c, g, t, unknown or other
  modified_base (21)..(21): a, c, g, t, unknown or other
acnggnacnacnggnggnggn

SEQ ID NO: 3246 - DNA, 21 bp, Artificial Sequence
  Description of Artificial Sequence: Synthetic oligonucleotide
  modified_base (3)..(3): a, c, g, t, unknown or other
  modified_base (6)..(6): a, c, g, t, unknown or other
  modified_base (9)..(9): a, c, g, t, unknown or other
  modified_base (12)..(12): a, c, g, t, unknown or other
  modified_base (15)..(15): a, c, g, t, unknown or other
  modified_base (18)..(18): a, c, g, t, unknown or other
  modified_base (21)..(21): a, c, g, t, unknown or other
acnggnacnggnacnggnggn

SEQ ID NO: 3247 - DNA, 21 bp, Artificial Sequence
  Description of Artificial Sequence: Synthetic oligonucleotide
  modified_base (3)..(3): a, c, g, t, unknown or other
  modified_base (6)..(6): a, c, g, t, unknown or other
  modified_base (9)..(9): a, c, g, t, unknown or other
  modified_base (12)..(12): a, c, g, t, unknown or other
  modified_base (15)..(15): a, c, g, t, unknown or other
  modified_base (18)..(18): a, c, g, t, unknown or other
  modified_base (21)..(21): a, c, g, t, unknown or other
acnggnacnggnggnacnggn

SEQ ID NO: 3248 - DNA, 21 bp, Artificial Sequence
  Description of Artificial Sequence: Synthetic oligonucleotide
  modified_base (3)..(3): a, c, g, t, unknown or other
  modified_base (6)..(6): a, c, g, t, unknown or other
  modified_base (9)..(9): a, c, g, t, unknown or other
  modified_base (12)..(12): a, c, g, t, unknown or other
  modified_base (15)..(15): a, c, g, t, unknown or other
  modified_base (18)..(18): a, c, g, t, unknown or other
  modified_base (21)..(21): a, c, g, t, unknown or other
acnggnacnggnggnggnacn

SEQ ID NO: 3249 - DNA, 21 bp, Artificial Sequence
  Description of Artificial Sequence: Synthetic oligonucleotide
  modified_base (3)..(3): a, c, g, t, unknown or other
  modified_base (6)..(6): a, c, g, t, unknown or other
  modified_base (9)..(9): a, c, g, t, unknown or other
  modified_base (12)..(12): a, c, g, t, unknown or other
  modified_base (15)..(15): a, c, g, t, unknown or other
  modified_base (18)..(18): a, c, g, t, unknown or other
  modified_base (21)..(21): a, c, g, t, unknown or other
acnggnggnacnacnggnggn

SEQ ID NO: 3250 - DNA, 21 bp, Artificial Sequence
  Description of Artificial Sequence: Synthetic oligonucleotide
  modified_base (3)..(3): a, c, g, t, unknown or other
  modified_base (6)..(6): a, c, g, t, unknown or other
  modified_base (9)..(9): a, c, g, t, unknown or other
  modified_base (12)..(12): a, c, g, t, unknown or other
  modified_base (15)..(15): a, c, g, t, unknown or other
  modified_base (18)..(18): a, c, g, t, unknown or other
  modified_base (21)..(21): a, c, g, t, unknown or other
acnggnggnacnggnacnggn

SEQ ID NO: 3251 - DNA, 21 bp, Artificial Sequence
  Description of Artificial Sequence: Synthetic oligonucleotide
  modified_base (3)..(3): a, c, g, t, unknown or other
  modified_base (6)..(6): a, c, g, t, unknown or other
  modified_base (9)..(9): a, c, g, t, unknown or other
  modified_base (12)..(12): a, c, g, t, unknown or other
  modified_base (15)..(15): a, c, g, t, unknown or other
  modified_base (18)..(18): a, c, g, t, unknown or other
  modified_base (21)..(21): a, c, g, t, unknown or other
acnggnggnacnggnggnacn

SEQ ID NO: 3252 - DNA, 21 bp, Artificial Sequence
  Description of Artificial Sequence: Synthetic oligonucleotide
  modified_base (3)..(3): a, c, g, t, unknown or other
  modified_base (6)..(6): a, c, g, t, unknown or other
  modified_base (9)..(9): a, c, g, t, unknown or other
  modified_base (12)..(12): a, c, g, t, unknown or other
  modified_base (15)..(15): a, c, g, t, unknown or other
  modified_base (18)..(18): a, c, g, t, unknown or other
  modified_base (21)..(21): a, c, g, t, unknown or other
acnggnggnggnacnggnacn

SEQ ID NO: 3253 - DNA, 21 bp, Artificial Sequence
  Description of Artificial Sequence: Synthetic oligonucleotide
  modified_base (3)..(3): a, c, g, t, unknown or other
  modified_base (6)..(6): a, c, g, t, unknown or other
  modified_base (9)..(9): a, c, g, t, unknown or other
  modified_base (12)..(12): a, c, g, t, unknown or other
  modified_base (15)..(15): a, c, g, t, unknown or other
  modified_base (18)..(18): a, c, g, t, unknown or other
  modified_base (21)..(21): a, c, g, t, unknown or other
acnggnggnggnacnacnggn

SEQ ID NO: 3254 - DNA, 21 bp, Artificial Sequence
  Description of Artificial Sequence: Synthetic oligonucleotide
  modified_base (3)..(3): a, c, g, t, unknown or other
  modified_base (6)..(6): a, c, g, t, unknown or other
  modified_base (9)..(9): a, c, g, t, unknown or other
  modified_base (12)..(12): a, c, g, t, unknown or other
  modified_base (15)..(15): a, c, g, t, unknown or other
  modified_base (18)..(18): a, c, g, t, unknown or other
  modified_base (21)..(21): a, c, g, t, unknown or other
acnggnggnggnggnacnacn

SEQ ID NO: 3255 - DNA, 21 bp, Artificial Sequence
  Description of Artificial Sequence: Synthetic oligonucleotide
  modified_base (3)..(3): a, c, g, t, unknown or other
  modified_base (6)..(6): a, c, g, t, unknown or other
  modified_base (9)..(9): a, c, g, t, unknown or other
  modified_base (12)..(12): a, c, g, t, unknown or other
  modified_base (15)..(15): a, c, g, t, unknown or other
  modified_base (18)..(18): a, c, g, t, unknown or other
  modified_base (21)..(21): a, c, g, t, unknown or other
acnacnggnacnggnggnggn

SEQ ID NO: 3256 - DNA, 21 bp, Artificial Sequence
  Description of Artificial Sequence: Synthetic oligonucleotide
  modified_base (3)..(3): a, c, g, t, unknown or other
  modified_base (6)..(6): a, c, g, t, unknown or other
  modified_base (9)..(9): a, c, g, t, unknown or other
  modified_base (12)..(12): a, c, g, t, unknown or other
  modified_base (15)..(15): a, c, g, t, unknown or other
  modified_base (18)..(18): a, c, g, t, unknown or other
  modified_base (21)..(21): a, c, g, t, unknown or other
acnacnggnggnacnggnggn

SEQ ID NO: 3257 - DNA, 21 bp, Artificial Sequence
  Description of Artificial Sequence: Synthetic oligonucleotide
  modified_base (3)..(3): a, c, g, t, unknown or other
  modified_base (6)..(6): a, c, g, t, unknown or other
  modified_base (9)..(9): a, c, g, t, unknown or other
  modified_base (12)..(12): a, c, g, t, unknown or other
  modified_base (15)..(15): a, c, g, t, unknown or other
  modified_base (18)..(18): a, c, g, t, unknown or other
  modified_base (21)..(21): a, c, g, t, unknown or other
acnacnggnggnggnacnggn

SEQ ID NO: 3258 - DNA, 21 bp, Artificial Sequence
  Description of Artificial Sequence: Synthetic oligonucleotide
  modified_base (3)..(3): a, c, g, t, unknown or other
  modified_base (6)..(6): a, c, g, t, unknown or other
  modified_base (9)..(9): a, c, g, t, unknown or other
  modified_base (12)..(12): a, c, g, t, unknown or other
  modified_base (15)..(15): a, c, g, t, unknown or other
  modified_base (18)..(18): a, c, g, t, unknown or other
  modified_base (21)..(21): a, c, g, t, unknown or other
acnacnggnggnggnggnacn

SEQ ID NO: 3259 - DNA, 21 bp, Artificial Sequence
  Description of Artificial Sequence: Synthetic oligonucleotide
  modified_base (3)..(3): a, c, g, t, unknown or other
  modified_base (6)..(6): a, c, g, t, unknown or other
  modified_base (9)..(9): a, c, g, t, unknown or other
  modified_base (12)..(12): a, c, g, t, unknown or other
  modified_base (15)..(15): a, c, g, t, unknown or other
  modified_base (18)..(18): a, c, g, t, unknown or other
  modified_base (21)..(21): a, c, g, t, unknown or other
ggnacnacnacnggnggnggn

SEQ ID NO: 3260 - DNA, 21 bp, Artificial Sequence
  Description of Artificial Sequence: Synthetic oligonucleotide
  modified_base (3)..(3): a, c, g, t, unknown or other
  modified_base (6)..(6): a, c, g, t, unknown or other
  modified_base (9)..(9): a, c, g, t, unknown or other
  modified_base (12)..(12): a, c, g, t, unknown or other
  modified_base (15)..(15): a, c, g, t, unknown or other
  modified_base (18)..(18): a, c, g, t, unknown or other
  modified_base (21)..(21): a, c, g, t, unknown or other
ggnacnacnggnacnggnggn

SEQ ID NO: 3261 - DNA, 21 bp, Artificial Sequence
  Description of Artificial Sequence: Synthetic oligonucleotide
  modified_base (3)..(3): a, c, g, t, unknown or other
  modified_base (6)..(6): a, c, g, t, unknown or other
  modified_base (9)..(9): a, c, g, t, unknown or other
  modified_base (12)..(12): a, c, g, t, unknown or other
  modified_base (15)..(15): a, c, g, t, unknown or other
  modified_base (18)..(18): a, c, g, t, unknown or other
  modified_base (21)..(21): a, c, g, t, unknown or other
ggnacnacnggnggnacnggn

SEQ ID NO: 3262 - DNA, 21 bp, Artificial Sequence
  Description of Artificial Sequence: Synthetic oligonucleotide
  modified_base (3)..(3): a, c, g, t, unknown or other
  modified_base (6)..(6): a, c, g, t, unknown or other
  modified_base (9)..(9): a, c, g, t, unknown or other
  modified_base (12)..(12): a, c, g, t, unknown or other
  modified_base (15)..(15): a, c, g, t, unknown or other
  modified_base (18)..(18): a, c, g, t, unknown or other
  modified_base (21)..(21): a, c, g, t, unknown or other
ggnacnacnggnggnggnacn

SEQ ID NO: 3263 - DNA, 21 bp, Artificial Sequence
  Description of Artificial Sequence: Synthetic oligonucleotide
  modified_base (3)..(3): a, c, g, t, unknown or other
  modified_base (6)..(6): a, c, g, t, unknown or other
  modified_base (9)..(9): a, c, g, t, unknown or other
  modified_base (12)..(12): a, c, g, t, unknown or other
  modified_base (15)..(15): a, c, g, t, unknown or other
  modified_base (18)..(18): a, c, g, t, unknown or other
  modified_base (21)..(21): a, c, g, t, unknown or other
ggnacnggnacnacnggnggn

SEQ ID NO: 3264 - DNA, 21 bp, Artificial Sequence
  Description of Artificial Sequence: Synthetic oligonucleotide
  modified_base (3)..(3): a, c, g, t, unknown or other
  modified_base (6)..(6): a, c, g, t, unknown or other
  modified_base (9)..(9): a, c, g, t, unknown or other
  modified_base (12)..(12): a, c, g, t, unknown or other
  modified_base (15)..(15): a, c, g, t, unknown or other
  modified_base (18)..(18): a, c, g, t, unknown or other
  modified_base (21)..(21): a, c, g, t, unknown or other
ggnacnggnggnacnacnggn

SEQ ID NO: 3265 - DNA, 21 bp, Artificial Sequence
  Description of Artificial Sequence: Synthetic oligonucleotide
  modified_base (3)..(3): a, c, g, t, unknown or other
  modified_base (6)..(6): a, c, g, t, unknown or other
  modified_base (9)..(9): a, c, g, t, unknown or other
  modified_base (12)..(12): a, c, g, t, unknown or other
  modified_base (15)..(15): a, c, g, t, unknown or other
  modified_base (18)..(18): a, c, g, t, unknown or other
  modified_base (21)..(21): a, c, g, t, unknown or other
ggnacnggnggnggnacnacn

SEQ ID NO: 3266 - DNA, 21 bp, Artificial Sequence
  Description of Artificial Sequence: Synthetic oligonucleotide
  modified_base (3)..(3): a, c, g, t, unknown or other
  modified_base (6)..(6): a, c, g, t, unknown or other
  modified_base (9)..(9): a, c, g, t, unknown or other
  modified_base (12)..(12): a, c, g, t, unknown or other
  modified_base (15)..(15): a, c, g, t, unknown or other
  modified_base (18)..(18): a, c, g, t, unknown or other
  modified_base (21)..(21): a, c, g, t, unknown or other
ggnacnggnacnggnacnggn

SEQ ID NO: 3267 - DNA, 21 bp, Artificial Sequence
  Description of Artificial Sequence: Synthetic oligonucleotide
  modified_base (3)..(3): a, c, g, t, unknown or other
  modified_base (6)..(6): a, c, g, t, unknown or other
  modified_base (9)..(9): a, c, g, t, unknown or other
  modified_base (12)..(12): a, c, g, t, unknown or other
  modified_base (15)..(15): a, c, g, t, unknown or other
  modified_base (18)..(18): a, c, g, t, unknown or other
  modified_base (21)..(21): a, c, g, t, unknown or other
ggnacnggnacnggnggnacn

SEQ ID NO: 3268 - DNA, 21 bp, Artificial Sequence
  Description of Artificial Sequence: Synthetic oligonucleotide
  modified_base (3)..(3): a, c, g, t, unknown or other
  modified_base (6)..(6): a, c, g, t, unknown or other
  modified_base (9)..(9): a, c, g, t, unknown or other
  modified_base (12)..(12): a, c, g, t, unknown or other
  modified_base (15)..(15): a, c, g, t, unknown or other
  modified_base (18)..(18): a, c, g, t, unknown or other
  modified_base (21)..(21): a, c, g, t, unknown or other
ggnacnggnggnacnggnacn

SEQ ID NO: 3269 - DNA, 21 bp, Artificial Sequence
  Description of Artificial Sequence: Synthetic oligonucleotide
  modified_base (3)..(3): a, c, g, t, unknown or other
  modified_base (6)..(6): a, c, g, t, unknown or other
  modified_base (9)..(9): a, c, g, t, unknown or other
  modified_base (12)..(12): a, c, g, t, unknown or other
  modified_base (15)..(15): a, c, g, t, unknown or other
  modified_base (18)..(18): a, c, g, t, unknown or other
  modified_base (21)..(21): a, c, g, t, unknown or other
ggnggnacnacnacnggnggn

SEQ ID NO: 3270 - DNA, 21 bp, Artificial Sequence
  Description of Artificial Sequence: Synthetic oligonucleotide
  modified_base (3)..(3): a, c, g, t, unknown or other
  modified_base (6)..(6): a, c, g, t, unknown or other
  modified_base (9)..(9): a, c, g, t, unknown or other
  modified_base (12)..(12): a, c, g, t, unknown or other
  modified_base (15)..(15): a, c, g, t, unknown or other
  modified_base (18)..(18): a, c, g, t, unknown or other
  modified_base (21)..(21): a, c, g, t, unknown or other
ggnggnacnacnggnacnggn

SEQ ID NO: 3271 - DNA, 21 bp, Artificial Sequence
  Description of Artificial Sequence: Synthetic oligonucleotide
  modified_base (3)..(3): a, c, g, t, unknown or other
  modified_base (6)..(6): a, c, g, t, unknown or other
  modified_base (9)..(9): a, c, g, t, unknown or other
  modified_base (12)..(12): a, c, g, t, unknown or other
  modified_base (15)..(15): a, c, g, t, unknown or other
  modified_base (18)..(18): a, c, g, t, unknown or other
  modified_base (21)..(21): a, c, g, t, unknown or other
ggnggnacnacnggnggnacn

SEQ ID NO: 3272 - DNA, 21 bp, Artificial Sequence
  Description of Artificial Sequence: Synthetic oligonucleotide
  modified_base (3)..(3): a, c, g, t, unknown or other
  modified_base (6)..(6): a, c, g, t, unknown or other
  modified_base (9)..(9): a, c, g, t, unknown or other
  modified_base (12)..(12): a, c, g, t, unknown or other
  modified_base (15)..(15): a, c, g, t, unknown or other
  modified_base (18)..(18): a, c, g, t, unknown or other
  modified_base (21)..(21): a, c, g, t, unknown or other
ggnggnacnggnacnacnggn

SEQ ID NO: 3273 - DNA, 21 bp, Artificial Sequence
  Description of Artificial Sequence: Synthetic oligonucleotide
  modified_base (3)..(3): a, c, g, t, unknown or other
  modified_base (6)..(6): a, c, g, t, unknown or other
  modified_base (9)..(9): a, c, g, t, unknown or other
  modified_base (12)..(12): a, c, g, t, unknown or other
  modified_base (15)..(15): a, c, g, t, unknown or other
  modified_base (18)..(18): a, c, g, t, unknown or other
  modified_base (21)..(21): a, c, g, t, unknown or other
ggnggnacnggnacnggnacn

SEQ ID NO: 3274 - DNA, 21 bp, Artificial Sequence
  Description of Artificial Sequence: Synthetic oligonucleotide
  modified_base (3)..(3): a, c, g, t, unknown or other
  modified_base (6)..(6): a, c, g, t, unknown or other
  modified_base (9)..(9): a, c, g, t, unknown or other
  modified_base (12)..(12): a, c, g, t, unknown or other
  modified_base (15)..(15): a, c, g, t, unknown or other
  modified_base (18)..(18): a, c, g, t, unknown or other
  modified_base (21)..(21): a, c, g, t, unknown or other
ggnggnacnggnggnacnacn

SEQ ID NO: 3275 - DNA, 21 bp, Artificial Sequence
  Description of Artificial Sequence: Synthetic oligonucleotide
  modified_base (3)..(3): a, c, g, t, unknown or other
  modified_base (6)..(6): a, c, g, t, unknown or other
  modified_base (9)..(9): a, c, g, t, unknown or other
  modified_base (12)..(12): a, c, g, t, unknown or other
  modified_base (15)..(15): a, c, g, t, unknown or other
  modified_base (18)..(18): a, c, g, t, unknown or other
  modified_base (21)..(21): a, c, g, t, unknown or other
ggnggnggnacnacnacnggn

SEQ ID NO: 3276 - DNA, 21 bp, Artificial Sequence
  Description of Artificial Sequence: Synthetic oligonucleotide
  modified_base (3)..(3): a, c, g, t, unknown or other
  modified_base (6)..(6): a, c, g, t, unknown or other
  modified_base (9)..(9): a, c, g, t, unknown or other
  modified_base (12)..(12): a, c, g, t, unknown or other
  modified_base (15)..(15): a, c, g, t, unknown or other
  modified_base (18)..(18): a, c, g, t, unknown or other
  modified_base (21)..(21): a, c, g, t, unknown or other
ggnggnggnacnacnggnacn

SEQ ID NO: 3277 - DNA, 21 bp, Artificial Sequence
  Description of Artificial Sequence: Synthetic oligonucleotide
  modified_base (3)..(3): a, c, g, t, unknown or other
  modified_base (6)..(6): a, c, g, t, unknown or other
  modified_base (9)..(9): a, c, g, t, unknown or other
  modified_base (12)..(12): a, c, g, t, unknown or other
  modified_base (15)..(15): a, c, g, t, unknown or other
  modified_base (18)..(18): a, c, g, t, unknown or other
  modified_base (21)..(21): a, c, g, t, unknown or other
ggnggnggnacnggnacnacn

SEQ ID NO: 3278 - DNA, 21 bp, Artificial Sequence
  Description of Artificial Sequence: Synthetic oligonucleotide
  modified_base (3)..(3): a, c, g, t, unknown or other
  modified_base (6)..(6): a, c, g, t, unknown or other
  modified_base (9)..(9): a, c, g, t, unknown or other
  modified_base (12)..(12): a, c, g, t, unknown or other
  modified_base (15)..(15): a, c, g, t, unknown or other
  modified_base (18)..(18): a, c, g, t, unknown or other
  modified_base (21)..(21): a, c, g, t, unknown or other
ggnggnggnggnggnacnacn

SEQ ID NO: 3279 - DNA, 21 bp, Artificial Sequence
  Description of Artificial Sequence: Synthetic oligonucleotide
  modified_base (3)..(3): a, c, g, t, unknown or other
  modified_base (6)..(6): a, c, g, t, unknown or other
  modified_base (9)..(9): a, c, g, t, unknown or other
  modified_base (12)..(12): a, c, g, t, unknown or other
  modified_base (15)..(15): a, c, g, t, unknown or other
  modified_base (18)..(18): a, c, g, t, unknown or other
  modified_base (21)..(21): a, c, g, t, unknown or other
acnacnggnggnggnggnggn

SEQ ID NO: 3280 - DNA, 21 bp, Artificial Sequence
  Description of Artificial Sequence: Synthetic oligonucleotide
  modified_base (3)..(3): a, c, g, t, unknown or other
  modified_base (6)..(6): a, c, g, t, unknown or other
  modified_base (9)..(9): a, c, g, t, unknown or other
  modified_base (12)..(12): a, c, g, t, unknown or other
  modified_base (15)..(15): a, c, g, t, unknown or other
  modified_base (18)..(18): a, c, g, t, unknown or other
  modified_base (21)..(21): a, c, g, t, unknown or other
acnggnacnggnggnggnggn

SEQ ID NO: 3281 - DNA, 21 bp, Artificial Sequence
  Description of Artificial Sequence: Synthetic oligonucleotide
  modified_base (3)..(3): a, c, g, t, unknown or other
  modified_base (6)..(6): a, c, g, t, unknown or other
  modified_base (9)..(9): a, c, g, t, unknown or other
  modified_base (12)..(12): a, c, g, t, unknown or other
  modified_base (15)..(15): a, c, g, t, unknown or other
  modified_base (18)..(18): a, c, g, t, unknown or other
  modified_base (21)..(21): a, c, g, t, unknown or other
acnggnggnacnggnggnggn

SEQ ID NO: 3282 - DNA, 21 bp, Artificial Sequence
  Description of Artificial Sequence: Synthetic oligonucleotide
  modified_base (3)..(3): a, c, g, t, unknown or other
  modified_base (6)..(6): a, c, g, t, unknown or other
  modified_base (9)..(9): a, c, g, t, unknown or other
  modified_base (12)..(12): a, c, g, t, unknown or other
  modified_base (15)..(15): a, c, g, t, unknown or other
  modified_base (18)..(18): a, c, g, t, unknown or other
  modified_base (21)..(21): a, c, g, t, unknown or other
acnggnggnggnacnggnggn

SEQ ID NO: 3283 - DNA, 21 bp, Artificial Sequence
  Description of Artificial Sequence: Synthetic oligonucleotide
  modified_base (3)..(3): a, c, g, t, unknown or other
  modified_base (6)..(6): a, c, g, t, unknown or other
  modified_base (9)..(9): a, c, g, t, unknown or other
  modified_base (12)..(12): a, c, g, t, unknown or other
  modified_base (15)..(15): a, c, g, t, unknown or other
  modified_base (18)..(18): a, c, g, t, unknown or other
  modified_base (21)..(21): a, c, g, t, unknown or other
acnggnggnggnggnacnggn

SEQ ID NO: 3284 - DNA, 21 bp, Artificial Sequence
  Description of Artificial Sequence: Synthetic oligonucleotide
  modified_base (3)..(3): a, c, g, t, unknown or other
  modified_base (6)..(6): a, c, g, t, unknown or other
  modified_base (9)..(9): a, c, g, t, unknown or other
  modified_base (12)..(12): a, c, g, t, unknown or other
  modified_base (15)..(15): a, c, g, t, unknown or other
  modified_base (18)..(18): a, c, g, t, unknown or other
  modified_base (21)..(21): a, c, g, t, unknown or other
acnggnggnggnggnggnacn

SEQ ID NO: 3285 - DNA, 21 bp, Artificial Sequence
  Description of Artificial Sequence: Synthetic oligonucleotide
  modified_base (3)..(3): a, c, g, t, unknown or other
  modified_base (6)..(6): a, c, g, t, unknown or other
  modified_base (9)..(9): a, c, g, t, unknown or other
  modified_base (12)..(12): a, c, g, t, unknown or other
  modified_base (15)..(15): a, c, g, t, unknown or other
  modified_base (18)..(18): a, c, g, t, unknown or other
  modified_base (21)..(21): a, c, g, t, unknown or other
ggnacnacnggnggnggnggn

SEQ ID NO: 3286 - DNA, 21 bp, Artificial Sequence
  Description of Artificial Sequence: Synthetic oligonucleotide
  modified_base (3)..(3): a, c, g, t, unknown or other
  modified_base (6)..(6): a, c, g, t, unknown or other
  modified_base (9)..(9): a, c, g, t, unknown or other
  modified_base (12)..(12): a, c, g, t, unknown or other
  modified_base (15)..(15): a, c, g, t, unknown or other
  modified_base (18)..(18): a, c, g, t, unknown or other
  modified_base (21)..(21): a, c, g, t, unknown or other
ggnacnggnacnggnggnggn

SEQ ID NO: 3287 - DNA, 21 bp, Artificial Sequence
  Description of Artificial Sequence: Synthetic oligonucleotide
  modified_base (3)..(3): a, c, g, t, unknown or other
  modified_base (6)..(6): a, c, g, t, unknown or other
  modified_base (9)..(9): a, c, g, t, unknown or other
  modified_base (12)..(12): a, c, g, t, unknown or other
  modified_base (15)..(15): a, c, g, t, unknown or other
  modified_base (18)..(18): a, c, g, t, unknown or other
  modified_base (21)..(21): a, c, g, t, unknown or other
ggnacnggnggnacnggnggn

SEQ ID NO: 3288 - DNA, 21 bp, Artificial Sequence
  Description of Artificial Sequence: Synthetic oligonucleotide
  modified_base (3)..(3): a, c, g, t, unknown or other
  modified_base (6)..(6): a, c, g, t, unknown or other
  modified_base (9)..(9): a, c, g, t, unknown or other
  modified_base (12)..(12): a, c, g, t, unknown or other
  modified_base (15)..(15): a, c, g, t, unknown or other
  modified_base (18)..(18): a, c, g, t, unknown or other
  modified_base (21)..(21): a, c, g, t, unknown or other
ggnacnggnggnggnacnggn

SEQ ID NO: 3289 - DNA, 21 bp, Artificial Sequence
  Description of Artificial Sequence: Synthetic oligonucleotide
  modified_base (3)..(3): a, c, g, t, unknown or other
  modified_base (6)..(6): a, c, g, t, unknown or other
  modified_base (9)..(9): a, c, g, t, unknown or other
  modified_base (12)..(12): a, c, g, t, unknown or other
  modified_base (15)..(15): a, c, g, t, unknown or other
  modified_base (18)..(18): a, c, g, t, unknown or other
  modified_base (21)..(21): a, c, g, t, unknown or other
ggnacnggnggnggnggnacn

SEQ ID NO: 3290 - DNA, 21 bp, Artificial Sequence
  Description of Artificial Sequence: Synthetic oligonucleotide
  modified_base (3)..(3): a, c, g, t, unknown or other
  modified_base (6)..(6): a, c, g, t, unknown or other
  modified_base (9)..(9): a, c, g, t, unknown or other
  modified_base (12)..(12): a, c, g, t, unknown or other
  modified_base (15)..(15): a, c, g, t, unknown or other
  modified_base (18)..(18): a, c, g, t, unknown or other
  modified_base (21)..(21): a, c, g, t, unknown or other
ggnggnacnacnggnggnggn

SEQ ID NO: 3291 - DNA, 21 bp, Artificial Sequence
  Description of Artificial Sequence: Synthetic oligonucleotide
  modified_base (3)..(3): a, c, g, t, unknown or other
  modified_base (6)..(6): a, c, g, t, unknown or other
  modified_base (9)..(9): a, c, g, t, unknown or other
  modified_base (12)..(12): a, c, g, t, unknown or other
  modified_base (15)..(15): a, c, g, t, unknown or other
  modified_base (18)..(18): a, c, g, t, unknown or other
  modified_base (21)..(21): a, c, g, t, unknown or other
ggnggnacnggnacnggnggn

SEQ ID NO: 3292 - DNA, 21 bp, Artificial Sequence
  Description of Artificial Sequence: Synthetic oligonucleotide
  modified_base (3)..(3): a, c, g, t, unknown or other
  modified_base (6)..(6): a, c, g, t, unknown or other
  modified_base (9)..(9): a, c, g, t, unknown or other
  modified_base (12)..(12): a, c, g, t, unknown or other
  modified_base (15)..(15): a, c, g, t, unknown or other
  modified_base (18)..(18): a, c, g, t, unknown or other
  modified_base (21)..(21): a, c, g, t, unknown or other
ggnggnacnggnggnacnggn

SEQ ID NO: 3293 - DNA, 21 bp, Artificial Sequence
  Description of Artificial Sequence: Synthetic oligonucleotide
  modified_base (3)..(3): a, c, g, t, unknown or other
  modified_base (6)..(6): a, c, g, t, unknown or other
  modified_base (9)..(9): a, c, g, t, unknown or other
  modified_base (12)..(12): a, c, g, t, unknown or other
  modified_base (15)..(15): a, c, g, t, unknown or other
  modified_base (18)..(18): a, c, g, t, unknown or other
  modified_base (21)..(21): a, c, g, t, unknown or other
ggnggnacnggnggnggnacn

SEQ ID NO: 3294 - DNA, 21 bp, Artificial Sequence
  Description of Artificial Sequence: Synthetic oligonucleotide
  modified_base (3)..(3): a, c, g, t, unknown or other
  modified_base (6)..(6): a, c, g, t, unknown or other
  modified_base (9)..(9): a, c, g, t, unknown or other
  modified_base (12)..(12): a, c, g, t, unknown or other
  modified_base (15)..(15): a, c, g, t, unknown or other
  modified_base (18)..(18): a, c, g, t, unknown or other
  modified_base (21)..(21): a, c, g, t, unknown or other
ggnggnggnacnacnggnggn

SEQ ID NO: 3295 - DNA, 21 bp, Artificial Sequence
  Description of Artificial Sequence: Synthetic oligonucleotide
  modified_base (3)..(3): a, c, g, t, unknown or other
  modified_base (6)..(6): a, c, g, t, unknown or other
  modified_base (9)..(9): a, c, g, t, unknown or other
  modified_base (12)..(12): a, c, g, t, unknown or other
  modified_base (15)..(15): a, c, g, t, unknown or other
  modified_base (18)..(18): a, c, g, t, unknown or other
  modified_base (21)..(21): a, c, g, t, unknown or other
ggnggnggnacnggnacnggn

SEQ ID NO: 3296 - DNA, 21 bp, Artificial Sequence
  Description of Artificial Sequence: Synthetic oligonucleotide
  modified_base (3)..(3): a, c, g, t, unknown or other
  modified_base (6)..(6): a, c, g, t, unknown or other
  modified_base (9)..(9): a, c, g, t, unknown or other
  modified_base (12)..(12): a, c, g, t, unknown or other
  modified_base (15)..(15): a, c, g, t, unknown or other
  modified_base (18)..(18): a, c, g, t, unknown or other
  modified_base (21)..(21): a, c, g, t, unknown or other
ggnggnggnacnggnggnacn

SEQ ID NO: 3297 - DNA, 21 bp, Artificial Sequence
  Description of Artificial Sequence: Synthetic oligonucleotide
  modified_base (3)..(3): a, c, g, t, unknown or other
  modified_base (6)..(6): a, c, g, t, unknown or other
  modified_base (9)..(9): a, c, g, t, unknown or other
  modified_base (12)..(12): a, c, g, t, unknown or other
  modified_base (15)..(15): a, c, g, t, unknown or other
  modified_base (18)..(18): a, c, g, t, unknown or other
  modified_base (21)..(21): a, c, g, t, unknown or other
ggnggnggnggnacnacnggn

SEQ ID NO: 3298 - DNA, 21 bp, Artificial Sequence
  Description of Artificial Sequence: Synthetic oligonucleotide
  modified_base (3)..(3): a, c, g, t, unknown or other
  modified_base (6)..(6): a, c, g, t, unknown or other
  modified_base (9)..(9): a, c, g, t, unknown or other
  modified_base (12)..(12): a, c, g, t, unknown or other
  modified_base (15)..(15): a, c, g, t, unknown or other
  modified_base (18)..(18): a, c, g, t, unknown or other
  modified_base (21)..(21): a, c, g, t, unknown or other
ggnggnggnggnacnggnacn

SEQ ID NO: 3299 - DNA, 21 bp, Artificial Sequence
  Description of Artificial Sequence: Synthetic oligonucleotide
  modified_base (3)..(3): a, c, g, t, unknown or other
  modified_base (6)..(6): a, c, g, t, unknown or other
  modified_base (9)..(9): a, c, g, t, unknown or other
  modified_base (12)..(12): a, c, g, t, unknown or other
  modified_base (15)..(15): a, c, g, t, unknown or other
  modified_base (18)..(18): a, c, g, t, unknown or other
  modified_base (21)..(21): a, c, g, t, unknown or other
ggnggnggnggnggnggnacn

SEQ ID NO: 3300 - DNA, 21 bp, Artificial Sequence
  Description of Artificial Sequence: Synthetic oligonucleotide
  modified_base (3)..(3): a, c, g, t, unknown or other
  modified_base (6)..(6): a, c, g, t, unknown or other
  modified_base (9)..(9): a, c, g, t, unknown or other
  modified_base (12)..(12): a, c, g, t, unknown or other
  modified_base (15)..(15): a, c, g, t, unknown or other
  modified_base (18)..(18): a, c, g, t, unknown or other
  modified_base (21)..(21): a, c, g, t, unknown or other
acnggnggnggnggnggnggn

SEQ ID NO: 3301 - DNA, 21 bp, Artificial Sequence
  Description of Artificial Sequence: Synthetic oligonucleotide
  modified_base (3)..(3): a, c, g, t, unknown or other
  modified_base (6)..(6): a, c, g, t, unknown or other
  modified_base (9)..(9): a, c, g, t, unknown or other
  modified_base (12)..(12): a, c, g, t, unknown or other
  modified_base (15)..(15): a, c, g, t, unknown or other
  modified_base (18)..(18): a, c, g, t, unknown or other
  modified_base (21)..(21): a, c, g, t, unknown or other
ggnacnggnggnggnggnggn

SEQ ID NO: 3302 - DNA, 21 bp, Artificial Sequence
  Description of Artificial Sequence: Synthetic oligonucleotide
  modified_base (3)..(3): a, c, g, t, unknown or other
  modified_base (6)..(6): a, c, g, t, unknown or other
  modified_base (9)..(9): a, c, g, t, unknown or other
  modified_base (12)..(12): a, c, g, t, unknown or other
  modified_base (15)..(15): a, c, g, t, unknown or other
  modified_base (18)..(18): a, c, g, t, unknown or other
  modified_base (21)..(21): a, c, g, t, unknown or other
ggnggnacnggnggnggnggn

SEQ ID NO: 3303 - DNA, 21 bp, Artificial Sequence
  Description of Artificial Sequence: Synthetic oligonucleotide
  modified_base (3)..(3): a, c, g, t, unknown or other
  modified_base (6)..(6): a, c, g, t, unknown or other
  modified_base (9)..(9): a, c, g, t, unknown or other
  modified_base (12)..(12): a, c, g, t, unknown or other
  modified_base (15)..(15): a, c, g, t, unknown or other
  modified_base (18)..(18): a, c, g, t, unknown or other
  modified_base (21)..(21): a, c, g, t, unknown or other
ggnggnggnacnggnggnggn

SEQ ID NO: 3304 - DNA, 21 bp, Artificial Sequence
  Description of Artificial Sequence: Synthetic oligonucleotide
  modified_base (3)..(3): a, c, g, t, unknown or other
  modified_base (6)..(6): a, c, g, t, unknown or other
  modified_base (9)..(9): a, c, g, t, unknown or other
  modified_base (12)..(12): a, c, g, t, unknown or other
  modified_base (15)..(15): a, c, g, t, unknown or other
  modified_base (18)..(18): a, c, g, t, unknown or other
  modified_base (21)..(21): a, c, g, t, unknown or other
ggnggnggnggnacnggnggn

SEQ ID NO: 3305 - DNA, 21 bp, Artificial Sequence
  Description of Artificial Sequence: Synthetic oligonucleotide
  modified_base (3)..(3): a, c, g, t, unknown or other
  modified_base (6)..(6): a, c, g, t, unknown or other
  modified_base (9)..(9): a, c, g, t, unknown or other
  modified_base (12)..(12): a, c, g, t, unknown or other
  modified_base (15)..(15): a, c, g, t, unknown or other
  modified_base (18)..(18): a, c, g, t, unknown or other
  modified_base (21)..(21): a, c, g, t, unknown or other
ggnggnggnggnggnacnggn

SEQ ID NO: 3306 - DNA, 12 bp, Artificial Sequence
  Description of Artificial Sequence: Synthetic oligonucleotide
  modified_base (3)..(3): a, c, g, t, unknown or other
  modified_base (6)..(6): a, c, g, t, unknown or other
  modified_base (9)..(9): a, c, g, t, unknown or other
  modified_base (12)..(12): a, c, g, t, unknown or other
ggnggnggngcn

SEQ ID NO: 3307 - DNA, 12 bp, Artificial Sequence
  Description of Artificial Sequence: Synthetic oligonucleotide
  modified_base (3)..(3): a, c, g, t, unknown or other
  modified_base (6)..(6): a, c, g, t, unknown or other
  modified_base (9)..(9): a, c, g, t, unknown or other
  modified_base (12)..(12): a, c, g, t, unknown or other
gcnggnggnggn

SEQ ID NO: 3308 - DNA, 12 bp, Artificial Sequence
  Description of Artificial Sequence: Synthetic oligonucleotide
  modified_base (3)..(3): a, c, g, t, unknown or other
  modified_base (6)..(6): a, c, g, t, unknown or other
  modified_base (9)..(9): a, c, g, t, unknown or other
  modified_base (12)..(12): a, c, g, t, unknown or other
ggngcnggnggn

SEQ ID NO: 3309 - DNA, 12 bp, Artificial Sequence
  Description of Artificial Sequence: Synthetic oligonucleotide
  modified_base (3)..(3): a, c, g, t, unknown or other
  modified_base (6)..(6): a, c, g, t, unknown or other
  modified_base (9)..(9): a, c, g, t, unknown or other
  modified_base (12)..(12): a, c, g, t, unknown or other
ggnggngcnggn

SEQ ID NO: 3310 - DNA, 15 bp, Artificial Sequence
  Description of Artificial Sequence: Synthetic oligonucleotide
  modified_base (3)..(3): a, c, g, t, unknown or other
  modified_base (6)..(6): a, c, g, t, unknown or other
  modified_base (9)..(9): a, c, g, t, unknown or other
  modified_base (12)..(12): a, c, g, t, unknown or other
  modified_base (15)..(15): a, c, g, t, unknown or other
ggnggnggnggngcn

SEQ ID NO: 3311 - DNA, 15 bp, Artificial Sequence
  Description of Artificial Sequence: Synthetic oligonucleotide
  modified_base (3)..(3): a, c, g, t, unknown or other
  modified_base (6)..(6): a, c, g, t, unknown or other
  modified_base (9)..(9): a, c, g, t, unknown or other
  modified_base (12)..(12): a, c, g, t, unknown or other
  modified_base (15)..(15): a, c, g, t, unknown or other
gcnggnggnggnggn

SEQ ID NO: 3312 - DNA, 15 bp, Artificial Sequence
  Description of Artificial Sequence: Synthetic oligonucleotide
  modified_base (3)..(3): a, c, g, t, unknown or other
  modified_base (6)..(6): a, c, g, t, unknown or other
  modified_base (9)..(9): a, c, g, t, unknown or other
  modified_base (12)..(12): a, c, g, t, unknown or other
  modified_base (15)..(15): a, c, g, t, unknown or other
ggngcnggnggnggn

SEQ ID NO: 3313 - DNA, 15 bp, Artificial Sequence
  Description of Artificial Sequence: Synthetic oligonucleotide
  modified_base (3)..(3): a, c, g, t, unknown or other
  modified_base (6)..(6): a, c, g, t, unknown or other
  modified_base (9)..(9): a, c, g, t, unknown or other
  modified_base (12)..(12): a, c, g, t, unknown or other
  modified_base (15)..(15): a, c, g, t, unknown or other
ggnggngcnggnggn

SEQ ID NO: 3314 - DNA, 15 bp, Artificial Sequence
  Description of Artificial Sequence: Synthetic oligonucleotide
  modified_base (3)..(3): a, c, g, t, unknown or other
  modified_base (6)..(6): a, c, g, t, unknown or other
  modified_base (9)..(9): a, c, g, t, unknown or other
  modified_base (12)..(12): a, c, g, t, unknown or other
  modified_base (15)..(15): a, c, g, t, unknown or other
ggnggnggngcnggn

SEQ ID NO: 3315 - DNA, 15 bp, Artificial Sequence
  Description of Artificial Sequence: Synthetic oligonucleotide
  modified_base (3)..(3): a, c, g, t, unknown or other
  modified_base (6)..(6): a, c, g, t, unknown or other
  modified_base (9)..(9): a, c, g, t, unknown or other
  modified_base (12)..(12): a, c, g, t, unknown or other
  modified_base (15)..(15): a, c, g, t, unknown or other
ggnggnggngcngcn

SEQ ID NO: 3316 - DNA, 15 bp, Artificial Sequence
  Description of Artificial Sequence: Synthetic oligonucleotide
  modified_base (3)..(3): a, c, g, t, unknown or other
  modified_base (6)..(6): a, c, g, t, unknown or other
  modified_base (9)..(9): a, c, g, t, unknown or other
  modified_base (12)..(12): a, c, g, t, unknown or other
  modified_base (15)..(15): a, c, g, t, unknown or other
gcngcnggnggnggn

SEQ ID NO: 3317 - DNA, 15 bp, Artificial Sequence
  Description of Artificial Sequence: Synthetic oligonucleotide
  modified_base (3)..(3): a, c, g, t, unknown or other
  modified_base (6)..(6): a, c, g, t, unknown or other
  modified_base (9)..(9): a, c, g, t, unknown or other
  modified_base (12)..(12): a, c, g, t, unknown or other
  modified_base (15)..(15): a, c, g, t, unknown or other
gcnggngcnggnggn

SEQ ID NO: 3318 - DNA, 15 bp, Artificial Sequence
  Description of Artificial Sequence: Synthetic oligonucleotide
  modified_base (3)..(3): a, c, g, t, unknown or other
  modified_base (6)..(6): a, c, g, t, unknown or other
  modified_base (9)..(9): a, c, g, t, unknown or other
  modified_base (12)..(12): a, c, g, t, unknown or other
  modified_base (15)..(15): a, c, g, t, unknown or other
gcnggnggngcnggn

SEQ ID NO: 3319 - DNA, 15 bp, Artificial Sequence
  Description of Artificial Sequence: Synthetic oligonucleotide
  modified_base (3)..(3): a, c, g, t, unknown or other
  modified_base (6)..(6): a, c, g, t, unknown or other
  modified_base (9)..(9): a, c, g, t, unknown or other
  modified_base (12)..(12): a, c, g, t, unknown or other
  modified_base (15)..(15): a, c, g, t, unknown or other
gcnggnggnggngcn

SEQ ID NO: 3320 - DNA, 15 bp, Artificial Sequence
  Description of Artificial Sequence: Synthetic oligonucleotide
  modified_base (3)..(3): a, c, g, t, unknown or other
  modified_base (6)..(6): a, c, g, t, unknown or other
  modified_base (9)..(9): a, c, g, t, unknown or other
  modified_base (12)..(12): a, c, g, t, unknown or other
  modified_base (15)..(15): a, c, g, t, unknown or other
ggngcngcnggnggn

SEQ ID NO: 3321 - DNA, 15 bp, Artificial Sequence
  Description of Artificial Sequence: Synthetic oligonucleotide
  modified_base (3)..(3): a, c, g, t, unknown or other
  modified_base (6)..(6): a, c, g, t, unknown or other
  modified_base (9)..(9): a, c, g, t, unknown or other
  modified_base (12)..(12): a, c, g, t, unknown or other
  modified_base (15)..(15): a, c, g, t, unknown or other
ggngcnggngcnggn

SEQ ID NO: 3322 - DNA, 15 bp, Artificial Sequence
  Description of Artificial Sequence: Synthetic oligonucleotide
  modified_base (3)..(3): a, c, g, t, unknown or other
  modified_base (6)..(6): a, c, g, t, unknown or other
  modified_base (9)..(9): a, c, g, t, unknown or other
  modified_base (12)..(12): a, c, g, t, unknown or other
  modified_base (15)..(15): a, c, g, t, unknown or other
ggngcnggnggngcn

SEQ ID NO: 3323 - DNA, 15 bp, Artificial Sequence
  Description of Artificial Sequence: Synthetic oligonucleotide
  modified_base (3)..(3): a, c, g, t, unknown or other
  modified_base (6)..(6): a, c, g, t, unknown or other
  modified_base (9)..(9): a, c, g, t, unknown or other
  modified_base (12)..(12): a, c, g, t, unknown or other
  modified_base (15)..(15): a, c, g, t, unknown or other
ggnggngcngcnggn

SEQ ID NO: 3324 - DNA, 15 bp, Artificial Sequence
  Description of Artificial Sequence: Synthetic oligonucleotide
  modified_base (3)..(3): a, c, g, t, unknown or other
  modified_base (6)..(6): a, c, g, t, unknown or other
  modified_base (9)..(9): a, c, g, t, unknown or other
  modified_base (12)..(12): a, c, g, t, unknown or other
  modified_base (15)..(15): a, c, g, t, unknown or other
ggnggngcnggngcn

SEQ ID NO: 3325 - DNA, 18 bp, Artificial Sequence
  Description of Artificial Sequence: Synthetic oligonucleotide
  modified_base (3)..(3): a, c, g, t, unknown or other
  modified_base (6)..(6): a, c, g, t, unknown or other
  modified_base (9)..(9): a, c, g, t, unknown or other
  modified_base (12)..(12): a, c, g, t, unknown or other
  modified_base (15)..(15): a, c, g, t, unknown or other
  modified_base (18)..(18): a, c, g, t, unknown or other
ggnggnggnggnggngcn

SEQ ID NO: 3326 - DNA, 18 bp, Artificial Sequence
  Description of Artificial Sequence: Synthetic oligonucleotide
  modified_base (3)..(3): a, c, g, t, unknown or other
  modified_base (6)..(6): a, c, g, t, unknown or other
  modified_base (9)..(9): a, c, g, t, unknown or other
  modified_base (12)..(12): a, c, g, t, unknown or other
  modified_base (15)..(15): a, c, g, t, unknown or other
  modified_base (18)..(18): a, c, g, t, unknown or other
gcnggnggnggnggnggn

SEQ ID NO: 3327 - DNA, 18 bp, Artificial Sequence
  Description of Artificial Sequence: Synthetic oligonucleotide
  modified_base (3)..(3): a, c, g, t, unknown or other
  modified_base (6)..(6): a, c, g, t, unknown or other
  modified_base (9)..(9): a, c, g, t, unknown or other
  modified_base (12)..(12): a, c, g, t, unknown or other
  modified_base (15)..(15): a, c, g, t, unknown or other
  modified_base (18)..(18): a, c, g, t, unknown or other
ggngcnggnggnggnggn

SEQ ID NO: 3328 - DNA, 18 bp, Artificial Sequence
  Description of Artificial Sequence: Synthetic oligonucleotide
  modified_base (3)..(3): a, c, g, t, unknown or other
  modified_base (6)..(6): a, c, g, t, unknown or other
  modified_base (9)..(9): a, c, g, t, unknown or other
  modified_base (12)..(12): a, c, g, t, unknown or other
  modified_base (15)..(15): a, c, g, t, unknown or other
  modified_base (18)..(18): a, c, g, t, unknown or other
ggnggngcnggnggnggn

SEQ ID NO: 3329 - DNA, 18 bp, Artificial Sequence
  Description of Artificial Sequence: Synthetic oligonucleotide
  modified_base (3)..(3): a, c, g, t, unknown or other
  modified_base (6)..(6): a, c, g, t, unknown or other
  modified_base (9)..(9): a, c, g, t, unknown or other
  modified_base (12)..(12): a, c, g, t, unknown or other
  modified_base (15)..(15): a, c, g, t, unknown or other
  modified_base (18)..(18): a, c, g, t, unknown or other
ggnggnggngcnggnggn

SEQ ID NO: 3330 - DNA, 18 bp, Artificial Sequence
  Description of Artificial Sequence: Synthetic oligonucleotide
  modified_base (3)..(3): a, c, g, t, unknown or other
  modified_base (6)..(6): a, c, g, t, unknown or other
  modified_base (9)..(9): a, c, g, t, unknown or other
  modified_base (12)..(12): a, c, g, t, unknown or other
  modified_base (15)..(15): a, c, g, t, unknown or other
  modified_base (18)..(18): a, c, g, t, unknown or other
ggnggnggnggngcnggn

SEQ ID NO: 3331 - DNA, 18 bp, Artificial Sequence
  Description of Artificial Sequence: Synthetic oligonucleotide
  modified_base (3)..(3): a, c, g, t, unknown or other
  modified_base (6)..(6): a, c, g, t, unknown or other
  modified_base (9)..(9): a, c, g, t, unknown or other
  modified_base (12)..(12): a, c, g, t, unknown or other
  modified_base (15)..(15): a, c, g, t, unknown or other
  modified_base (18)..(18): a, c, g, t, unknown or other
ggnggnggnggngcngcn

SEQ ID NO: 3332 - DNA, 18 bp, Artificial Sequence
  Description of Artificial Sequence: Synthetic oligonucleotide
  modified_base (3)..(3): a, c, g, t, unknown or other
  modified_base (6)..(6): a, c, g, t, unknown or other
  modified_base (9)..(9): a, c, g, t, unknown or other
  modified_base (12)..(12): a, c, g, t, unknown or other
  modified_base (15)..(15): a, c, g, t, unknown or other
  modified_base (18)..(18): a, c, g, t, unknown or other
gcngcnggnggnggnggn

SEQ ID NO: 3333 - DNA, 18 bp, Artificial Sequence
  Description of Artificial Sequence: Synthetic oligonucleotide
  modified_base (3)..(3): a, c, g, t, unknown or other
  modified_base (6)..(6): a, c, g, t, unknown or other
  modified_base (9)..(9): a, c, g, t, unknown or other
  modified_base (12)..(12): a, c, g, t, unknown or other
  modified_base (15)..(15): a, c, g, t, unknown or other
  modified_base (18)..(18): a, c, g, t, unknown or other
gcnggngcnggnggnggn

SEQ ID NO: 3334 - DNA, 18 bp, Artificial Sequence
  Description of Artificial Sequence: Synthetic oligonucleotide
  modified_base (3)..(3): a, c, g, t, unknown or other
  modified_base (6)..(6): a, c, g, t, unknown or other
  modified_base (9)..(9): a, c, g, t, unknown or other
  modified_base (12)..(12): a, c, g, t, unknown or other
  modified_base (15)..(15): a, c, g, t, unknown or other
  modified_base (18)..(18): a, c, g, t, unknown or other
gcnggnggngcnggnggn

SEQ ID NO: 3335 - DNA, 18 bp, Artificial Sequence
  Description of Artificial Sequence: Synthetic oligonucleotide
  modified_base (3)..(3): a, c, g, t, unknown or other
  modified_base (6)..(6): a, c, g, t, unknown or other
  modified_base (9)..(9): a, c, g, t, unknown or other
  modified_base (12)..(12): a, c, g, t, unknown or other
  modified_base (15)..(15): a, c, g, t, unknown or other
  modified_base (18)..(18): a, c, g, t, unknown or other
gcnggnggnggngcnggn

SEQ ID NO: 3336 - DNA, 18 bp, Artificial Sequence
  Description of Artificial Sequence: Synthetic oligonucleotide
  modified_base (3)..(3): a, c, g, t, unknown or other
  modified_base (6)..(6): a, c, g, t, unknown or other
  modified_base (9)..(9): a, c, g, t, unknown or other
  modified_base (12)..(12): a, c, g, t, unknown or other
  modified_base (15)..(15): a, c, g, t, unknown or other
  modified_base (18)..(18): a, c, g, t, unknown or other
gcnggnggnggnggngcn

SEQ ID NO: 3337 - DNA, 18 bp, Artificial Sequence
  Description of Artificial Sequence: Synthetic oligonucleotide
  modified_base (3)..(3): a, c, g, t, unknown or other
  modified_base (6)..(6): a, c, g, t, unknown or other
  modified_base (9)..(9): a, c, g, t, unknown or other
  modified_base (12)..(12): a, c, g, t, unknown or other
  modified_base (15)..(15): a, c, g, t, unknown or other
  modified_base (18)..(18): a, c, g, t, unknown or other
ggngcngcnggnggnggn

SEQ ID NO: 3338 - DNA, 18 bp, Artificial Sequence
  Description of Artificial Sequence: Synthetic oligonucleotide
  modified_base (3)..(3): a, c, g, t, unknown or other
  modified_base (6)..(6): a, c, g, t, unknown or other
  modified_base (9)..(9): a, c, g, t, unknown or other
  modified_base (12)..(12): a, c, g, t, unknown or other
  modified_base (15)..(15): a, c, g, t, unknown or other
  modified_base (18)..(18): a, c, g, t, unknown or other
ggngcnggngcnggnggn

SEQ ID NO: 3339 - DNA, 18 bp, Artificial Sequence
  Description of Artificial Sequence: Synthetic oligonucleotide
  modified_base (3)..(3): a, c, g, t, unknown or other
  modified_base (6)..(6): a, c, g, t, unknown or other
  modified_base (9)..(9): a, c, g, t, unknown or other
  modified_base (12)..(12): a, c, g, t, unknown or other
  modified_base (15)..(15): a, c, g, t, unknown or other
  modified_base (18)..(18): a, c, g, t, unknown or other
ggngcnggnggngcnggn

SEQ ID NO: 3340 - DNA, 18 bp, Artificial Sequence
  Description of Artificial Sequence: Synthetic oligonucleotide
  modified_base (3)..(3): a, c, g, t, unknown or other
  modified_base (6)..(6): a, c, g, t, unknown or other
  modified_base (9)..(9): a, c, g, t, unknown or other
  modified_base (12)..(12): a, c, g, t, unknown or other
  modified_base (15)..(15): a, c, g, t, unknown or other
  modified_base (18)..(18): a, c, g, t, unknown or other
ggngcnggnggnggngcn

SEQ ID NO: 3341 - DNA, 18 bp, Artificial Sequence
  Description of Artificial Sequence: Synthetic oligonucleotide
  modified_base (3)..(3): a, c, g, t, unknown or other
  modified_base (6)..(6): a, c, g, t, unknown or other
  modified_base (9)..(9): a, c, g, t, unknown or other
  modified_base (12)..(12): a, c, g, t, unknown or other
  modified_base (15)..(15): a, c, g, t, unknown or other
  modified_base (18)..(18): a, c, g, t, unknown or other
ggnggngcngcnggnggn

SEQ ID NO: 3342 - DNA, 18 bp, Artificial Sequence
  Description of Artificial Sequence: Synthetic oligonucleotide
  modified_base (3)..(3): a, c, g, t, unknown or other
  modified_base (6)..(6): a, c, g, t, unknown or other
  modified_base (9)..(9): a, c, g, t, unknown or other
  modified_base (12)..(12): a, c, g, t, unknown or other
  modified_base (15)..(15): a, c, g, t, unknown or other
  modified_base (18)..(18): a, c, g, t, unknown or other
ggnggngcnggngcnggn

SEQ ID NO: 3343 - DNA, 18 bp, Artificial Sequence
  Description of Artificial Sequence: Synthetic oligonucleotide
  modified_base (3)..(3): a, c, g, t, unknown or other
  modified_base (6)..(6): a, c, g, t, unknown or other
  modified_base (9)..(9): a, c, g, t, unknown or other
  modified_base (12)..(12): a, c, g, t, unknown or other
  modified_base (15)..(15): a, c, g, t, unknown or other
  modified_base (18)..(18): a, c, g, t, unknown or other
ggnggngcnggnggngcn

SEQ ID NO: 3344 - DNA, 18 bp, Artificial Sequence
  Description of Artificial Sequence: Synthetic oligonucleotide
  modified_base (3)..(3): a, c, g, t, unknown or other
  modified_base (6)..(6): a, c, g, t, unknown or other
  modified_base (9)..(9): a, c, g, t, unknown or other
  modified_base (12)..(12): a, c, g, t, unknown or other
  modified_base (15)..(15): a, c, g, t, unknown or other
  modified_base (18)..(18): a, c, g, t, unknown or other
ggnggnggngcngcnggn

SEQ ID NO: 3345 - DNA, 18 bp, Artificial Sequence
  Description of Artificial Sequence: Synthetic oligonucleotide
  modified_base (3)..(3): a, c, g, t, unknown or other
  modified_base (6)..(6): a, c, g, t, unknown or other
  modified_base (9)..(9): a, c, g, t, unknown or other
  modified_base (12)..(12): a, c, g, t, unknown or other
  modified_base (15)..(15): a, c, g, t, unknown or other
  modified_base (18)..(18): a, c, g, t, unknown or other
ggnggnggngcnggngcn

SEQ ID NO: 3346 - DNA, 21 bp, Artificial Sequence
  Description of Artificial Sequence: Synthetic oligonucleotide
  modified_base (3)..(3): a, c, g, t, unknown or other
  modified_base (6)..(6): a, c, g, t, unknown or other
  modified_base (9)..(9): a, c, g, t, unknown or other
  modified_base (12)..(12): a, c, g, t, unknown or other
  modified_base (15)..(15): a, c, g, t, unknown or other
  modified_base (18)..(18): a, c, g, t, unknown or other
  modified_base (21)..(21): a, c, g, t, unknown or other
ggnggnggnggngcngcngcn

SEQ ID NO: 3347 - DNA, 21 bp, Artificial Sequence
  Description of Artificial Sequence: Synthetic oligonucleotide
  modified_base (3)..(3): a, c, g, t, unknown or other
  modified_base (6)..(6): a, c, g, t, unknown or other
  modified_base (9)..(9): a, c, g, t, unknown or other
  modified_base (12)..(12): a, c, g, t, unknown or other
  modified_base (15)..(15): a, c, g, t, unknown or other
  modified_base (18)..(18): a, c, g, t, unknown or other
  modified_base (21)..(21): a, c, g, t, unknown or other
gcngcngcnggnggnggnggn

SEQ ID NO: 3348 - DNA, 21 bp, Artificial Sequence
  Description of Artificial Sequence: Synthetic oligonucleotide
  modified_base (3)..(3): a, c, g, t, unknown or other
  modified_base (6)..(6): a, c, g, t, unknown or other
  modified_base (9)..(9): a, c, g, t, unknown or other
  modified_base (12)..(12): a, c, g, t, unknown or other
  modified_base (15)..(15): a, c, g, t, unknown or other
  modified_base (18)..(18): a, c, g, t, unknown or other
  modified_base (21)..(21): a, c, g, t, unknown or other
gcnggngcngcnggnggnggn

SEQ ID NO: 3349 - DNA, 21 bp, Artificial Sequence
  Description of Artificial Sequence: Synthetic oligonucleotide
  modified_base (3)..(3): a, c, g, t, unknown or other
  modified_base (6)..(6): a, c, g, t, unknown or other
  modified_base (9)..(9): a, c, g, t, unknown or other
  modified_base (12)..(12): a, c, g, t, unknown or other
  modified_base (15)..(15): a, c, g, t, unknown or other
  modified_base (18)..(18): a, c, g, t, unknown or other
  modified_base (21)..(21): a, c, g, t, unknown or other
gcnggngcnggngcnggnggn

SEQ ID NO: 3350 - DNA, 21 bp, Artificial Sequence
  Description of Artificial Sequence: Synthetic oligonucleotide
  modified_base (3)..(3): a, c, g, t, unknown or other
  modified_base (6)..(6): a, c, g, t, unknown or other
  modified_base (9)..(9): a, c, g, t, unknown or other
  modified_base (12)..(12): a, c, g, t, unknown or other
  modified_base (15)..(15): a, c, g, t, unknown or other
  modified_base (18)..(18): a, c, g, t, unknown or other
  modified_base (21)..(21): a, c, g, t, unknown or other
gcnggngcnggnggngcnggn

SEQ ID NO: 3351 - DNA, 21 bp, Artificial Sequence
  Description of Artificial Sequence: Synthetic oligonucleotide
  modified_base (3)..(3): a, c, g, t, unknown or other
  modified_base (6)..(6): a, c, g, t, unknown or other
  modified_base (9)..(9): a, c, g, t, unknown or other
  modified_base (12)..(12): a, c, g, t, unknown or other
  modified_base (15)..(15): a, c, g, t, unknown or other
  modified_base (18)..(18): a, c, g, t, unknown or other
  modified_base (21)..(21): a, c, g, t, unknown or other
gcnggngcnggnggnggngcn

SEQ ID NO: 3352 - DNA, 21 bp, Artificial Sequence
  Description of Artificial Sequence: Synthetic oligonucleotide
  modified_base (3)..(3): a, c, g, t, unknown or other
  modified_base (6)..(6): a, c, g, t, unknown or other
  modified_base (9)..(9): a, c, g, t, unknown or other
  modified_base (12)..(12): a, c, g, t, unknown or other
  modified_base (15)..(15): a, c, g, t, unknown or other
  modified_base (18)..(18): a, c, g, t, unknown or other
  modified_base (21)..(21): a, c, g, t, unknown or other
gcnggnggngcngcnggnggn

SEQ ID NO: 3353 - DNA, 21 bp, Artificial Sequence
  Description of Artificial Sequence: Synthetic oligonucleotide
  modified_base (3)..(3): a, c, g, t, unknown or other
  modified_base (6)..(6): a, c, g, t, unknown or other
  modified_base (9)..(9): a, c, g, t, unknown or other
  modified_base (12)..(12): a, c, g, t, unknown or other
  modified_base (15)..(15): a, c, g, t, unknown or other
  modified_base (18)..(18): a, c, g, t, unknown or other
  modified_base (21)..(21): a, c, g, t, unknown or other
gcnggnggngcnggngcnggn

SEQ ID NO: 3354 - DNA, 21 bp, Artificial Sequence
  Description of Artificial Sequence: Synthetic oligonucleotide
  modified_base (3)..(3): a, c, g, t, unknown or other
  modified_base (6)..(6): a, c, g, t, unknown or other
  modified_base (9)..(9): a, c, g, t, unknown or other
  modified_base (12)..(12): a, c, g, t, unknown or other
  modified_base (15)..(15): a, c, g, t, unknown or other
  modified_base (18)..(18): a, c, g, t, unknown or other
  modified_base (21)..(21): a, c, g, t, unknown or other
gcnggnggngcnggnggngcn

SEQ ID NO: 3355 - DNA, 21 bp, Artificial Sequence
  Description of Artificial Sequence: Synthetic oligonucleotide
  modified_base (3)..(3): a, c, g, t, unknown or other
  modified_base (6)..(6): a, c, g, t, unknown or other
  modified_base (9)..(9): a, c, g, t, unknown or other
  modified_base (12)..(12): a, c, g, t, unknown or other
  modified_base (15)..(15): a, c, g, t, unknown or other
  modified_base (18)..(18): a, c, g, t, unknown or other
  modified_base (21)..(21): a, c, g, t, unknown or other
gcnggnggnggngcnggngcn

SEQ ID NO: 3356 - DNA, 21 bp, Artificial Sequence
  Description of Artificial Sequence: Synthetic oligonucleotide
  modified_base (3)..(3): a, c, g, t, unknown or other
  modified_base (6)..(6): a, c, g, t, unknown or other
  modified_base (9)..(9): a, c, g, t, unknown or other
  modified_base (12)..(12): a, c, g, t, unknown or other
  modified_base (15)..(15): a, c, g, t, unknown or other
  modified_base (18)..(18): a, c, g, t, unknown or other
  modified_base (21)..(21): a, c, g, t, unknown or other
gcnggnggnggngcngcnggn

SEQ ID NO: 3357 - DNA, 21 bp, Artificial Sequence
  Description of Artificial Sequence: Synthetic oligonucleotide
  modified_base (3)..(3): a, c, g, t, unknown or other
  modified_base (6)..(6): a, c, g, t, unknown or other
  modified_base (9)..(9): a, c, g, t, unknown or other
  modified_base (12)..(12): a, c, g, t, unknown or other
  modified_base (15)..(15): a, c, g, t, unknown or other
  modified_base (18)..(18): a, c, g, t, unknown or other
  modified_base (21)..(21): a, c, g, t, unknown or other
gcnggnggnggnggngcngcn

SEQ ID NO: 3358 - DNA, 21 bp, Artificial Sequence
  Description of Artificial Sequence: Synthetic oligonucleotide
  modified_base (3)..(3): a, c, g, t, unknown or other
  modified_base (6)..(6): a, c, g, t, unknown or other
  modified_base (9)..(9): a, c, g, t, unknown or other
  modified_base (12)..(12): a, c, g, t, unknown or other
  modified_base (15)..(15): a, c, g, t, unknown or other
  modified_base (18)..(18): a, c, g, t, unknown or other
  modified_base (21)..(21): a, c, g, t, unknown or other
gcngcnggngcnggnggnggn

SEQ ID NO: 3359 - DNA, 21 bp, Artificial Sequence
  Description of Artificial Sequence: Synthetic oligonucleotide
  modified_base (3)..(3): a, c, g, t, unknown or other
  modified_base (6)..(6): a, c, g, t, unknown or other
  modified_base (9)..(9): a, c, g, t, unknown or other
  modified_base (12)..(12): a, c, g, t, unknown or other
  modified_base (15)..(15): a, c, g, t, unknown or other
  modified_base (18)..(18): a, c, g, t, unknown or other
  modified_base (21)..(21): a, c, g, t, unknown or other
gcngcnggnggngcnggnggn

SEQ ID NO: 3360 - DNA, 21 bp, Artificial Sequence
  Description of Artificial Sequence: Synthetic oligonucleotide
  modified_base (3)..(3): a, c, g, t, unknown or other
  modified_base (6)..(6): a, c, g, t, unknown or other
  modified_base (9)..(9): a, c, g, t, unknown or other
  modified_base (12)..(12): a, c, g, t, unknown or other
  modified_base (15)..(15): a, c, g, t, unknown or other
  modified_base (18)..(18): a, c, g, t, unknown or other
  modified_base (21)..(21): a, c, g, t, unknown or other
gcngcnggnggnggngcnggn

SEQ ID NO: 3361 - DNA, 21 bp, Artificial Sequence
  Description of Artificial Sequence: Synthetic oligonucleotide
  modified_base (3)..(3): a, c, g, t, unknown or other
  modified_base (6)..(6): a, c, g, t, unknown or other
  modified_base (9)..(9): a, c, g, t, unknown or other
  modified_base (12)..(12): a, c, g, t, unknown or other
  modified_base (15)..(15): a, c, g, t, unknown or other
  modified_base (18)..(18): a, c, g, t, unknown or other
  modified_base (21)..(21): a, c, g, t, unknown or other
gcngcnggnggnggnggngcn

SEQ ID NO: 3362 - DNA, 21 bp, Artificial Sequence
  Description of Artificial Sequence: Synthetic oligonucleotide
  modified_base (3)..(3): a, c, g, t, unknown or other
  modified_base (6)..(6): a, c, g, t, unknown or other
  modified_base (9)..(9): a, c, g, t, unknown or other
  modified_base (12)..(12): a, c, g, t, unknown or other
  modified_base (15)..(15): a, c, g, t, unknown or other
  modified_base (18)..(18): a, c, g, t, unknown or other
  modified_base (21)..(21): a, c, g, t, unknown or other
ggngcngcngcnggnggnggn

SEQ ID NO: 3363 - DNA, 21 bp, Artificial Sequence
  Description of Artificial Sequence: Synthetic oligonucleotide
  modified_base (3)..(3): a, c, g, t, unknown or other
  modified_base (6)..(6): a, c, g, t, unknown or other
  modified_base (9)..(9): a, c, g, t, unknown or other
  modified_base (12)..(12): a, c, g, t, unknown or other
  modified_base (15)..(15): a, c, g, t, unknown or other
  modified_base (18)..(18): a, c, g, t, unknown or other
  modified_base (21)..(21): a, c, g, t, unknown or other
ggngcngcnggngcnggnggn

SEQ ID NO: 3364 - DNA, 21 bp, Artificial Sequence
  Description of Artificial Sequence: Synthetic oligonucleotide
  modified_base (3)..(3): a, c, g, t, unknown or other
  modified_base (6)..(6): a, c, g, t, unknown or other
  modified_base (9)..(9): a, c, g, t, unknown or other
  modified_base (12)..(12): a, c, g, t, unknown or other
  modified_base (15)..(15): a, c, g, t, unknown or other
  modified_base (18)..(18): a, c, g, t, unknown or other
  modified_base (21)..(21): a, c, g, t, unknown or other
ggngcngcnggnggngcnggn

SEQ ID NO: 3365 - DNA, 21 bp, Artificial Sequence
  Description of Artificial Sequence: Synthetic oligonucleotide
  modified_base (3)..(3): a, c, g, t, unknown or other
  modified_base (6)..(6): a, c, g, t, unknown or other
  modified_base (9)..(9): a, c, g, t, unknown or other
  modified_base (12)..(12): a, c, g, t, unknown or other
  modified_base (15)..(15): a, c, g, t, unknown or other
  modified_base (18)..(18): a, c, g, t, unknown or other
  modified_base (21)..(21): a, c, g, t, unknown or other
ggngcngcnggnggnggngcn

SEQ ID NO: 3366 - DNA, 21 bp, Artificial Sequence
  Description of Artificial Sequence: Synthetic oligonucleotide
  modified_base (3)..(3): a, c, g, t, unknown or other
  modified_base (6)..(6): a, c, g, t, unknown or other
  modified_base (9)..(9): a, c, g, t, unknown or other
  modified_base (12)..(12): a, c, g, t, unknown or other
  modified_base (15)..(15): a, c, g, t, unknown or other
  modified_base (18)..(18): a, c, g, t, unknown or other
  modified_base (21)..(21): a, c, g, t, unknown or other
ggngcnggngcngcnggnggn

SEQ ID NO: 3367 - DNA, 21 bp, Artificial Sequence
  Description of Artificial Sequence: Synthetic oligonucleotide
  modified_base (3)..(3): a, c, g, t, unknown or other
  modified_base (6)..(6): a, c, g, t, unknown or other
  modified_base (9)..(9): a, c, g, t, unknown or other
  modified_base (12)..(12): a, c, g, t, unknown or other
  modified_base (15)..(15): a, c, g, t, unknown or other
  modified_base (18)..(18): a, c, g, t, unknown or other
  modified_base (21)..(21): a, c, g, t, unknown or other
ggngcnggnggngcngcnggn

SEQ ID NO: 3368 - DNA, 21 bp, Artificial Sequence
  Description of Artificial Sequence: Synthetic oligonucleotide
  modified_base (3)..(3): a, c, g, t, unknown or other
  modified_base (6)..(6): a, c, g, t, unknown or other
  modified_base (9)..(9): a, c, g, t, unknown or other
  modified_base (12)..(12): a, c, g, t, unknown or other
  modified_base (15)..(15): a, c, g, t, unknown or other
  modified_base (18)..(18): a, c, g, t, unknown or other
  modified_base (21)..(21): a, c, g, t, unknown or other
ggngcnggnggnggngcngcn

SEQ ID NO: 3369 - DNA, 21 bp, Artificial Sequence
  Description of Artificial Sequence: Synthetic oligonucleotide
  modified_base (3)..(3): a, c, g, t, unknown or other
  modified_base (6)..(6): a, c, g, t, unknown or other
  modified_base (9)..(9): a, c, g, t, unknown or other
  modified_base (12)..(12): a, c, g, t, unknown or other
  modified_base (15)..(15): a, c, g, t, unknown or other
  modified_base (18)..(18): a, c, g, t, unknown or other
  modified_base (21)..(21): a, c, g, t, unknown or other
ggngcnggngcnggngcnggn

SEQ ID NO: 3370 - DNA, 21 bp, Artificial Sequence
  Description of Artificial Sequence: Synthetic oligonucleotide
  modified_base (3)..(3): a, c, g, t, unknown or other
  modified_base (6)..(6): a, c, g, t, unknown or other
  modified_base (9)..(9): a, c, g, t, unknown or other
  modified_base (12)..(12): a, c, g, t, unknown or other
  modified_base (15)..(15): a, c, g, t, unknown or other
  modified_base (18)..(18): a, c, g, t, unknown or other
  modified_base (21)..(21): a, c, g, t, unknown or other
ggngcnggngcnggnggngcn

SEQ ID NO: 3371 - DNA, 21 bp, Artificial Sequence
  Description of Artificial Sequence: Synthetic oligonucleotide
  modified_base (3)..(3): a, c, g, t, unknown or other
  modified_base (6)..(6): a, c, g, t, unknown or other
  modified_base (9)..(9): a, c, g, t, unknown or other
  modified_base (12)..(12): a, c, g, t, unknown or other
  modified_base (15)..(15): a, c, g, t, unknown or other
  modified_base (18)..(18): a, c, g, t, unknown or other
  modified_base (21)..(21): a, c, g, t, unknown or other
ggngcnggnggngcnggngcn

SEQ ID NO: 3372 - DNA, 21 bp, Artificial Sequence
  Description of Artificial Sequence: Synthetic oligonucleotide
  modified_base (3)..(3): a, c, g, t, unknown or other
  modified_base (6)..(6): a, c, g, t, unknown or other
  modified_base (9)..(9): a, c, g, t, unknown or other
  modified_base (12)..(12): a, c, g, t, unknown or other
  modified_base (15)..(15): a, c, g, t, unknown or other
  modified_base (18)..(18): a, c, g, t, unknown or other
  modified_base (21)..(21): a, c, g, t, unknown or other
ggnggngcngcngcnggnggn

SEQ ID NO: 3373 - DNA, 21 bp, Artificial Sequence
  Description of Artificial Sequence: Synthetic oligonucleotide
  modified_base (3)..(3): a, c, g, t, unknown or other
  modified_base (6)..(6): a, c, g, t, unknown or other
  modified_base (9)..(9): a, c, g, t, unknown or other
  modified_base (12)..(12): a, c, g, t, unknown or other
  modified_base (15)..(15): a, c, g, t, unknown or other
  modified_base (18)..(18): a, c, g, t, unknown or other
  modified_base (21)..(21): a, c, g, t, unknown or other
ggnggngcngcnggngcnggn

SEQ ID NO: 3374 - DNA, 21 bp, Artificial Sequence
  Description of Artificial Sequence: Synthetic oligonucleotide
  modified_base (3)..(3): a, c, g, t, unknown or other
  modified_base (6)..(6): a, c, g, t, unknown or other
  modified_base (9)..(9): a, c, g, t, unknown or other
  modified_base (12)..(12): a, c, g, t, unknown or other
  modified_base (15)..(15): a, c, g, t, unknown or other
  modified_base (18)..(18): a, c, g, t, unknown or other
  modified_base (21)..(21): a, c, g, t, unknown or other
ggnggngcngcnggnggngcn

SEQ ID NO: 3375 - DNA, 21 bp, Artificial Sequence
  Description of Artificial Sequence: Synthetic oligonucleotide
  modified_base (3)..(3): a, c, g, t, unknown or other
  modified_base (6)..(6): a, c, g, t, unknown or other
  modified_base (9)..(9): a, c, g, t, unknown or other
  modified_base (12)..(12): a, c, g, t, unknown or other
  modified_base (15)..(15): a, c, g, t, unknown or other
  modified_base (18)..(18): a, c, g, t, unknown or other
  modified_base (21)..(21): a, c, g, t, unknown or other
ggnggngcnggngcngcnggn

SEQ ID NO: 3376 - DNA, 21 bp, Artificial Sequence
  Description of Artificial Sequence: Synthetic oligonucleotide
  modified_base (3)..(3): a, c, g, t, unknown or other
  modified_base (6)..(6): a, c, g, t, unknown or other
  modified_base (9)..(9): a, c, g, t, unknown or other
  modified_base (12)..(12): a, c, g, t, unknown or other
  modified_base (15)..(15): a, c, g, t, unknown or other
  modified_base (18)..(18): a, c, g, t, unknown or other
  modified_base (21)..(21): a, c, g, t, unknown or other
ggnggngcnggngcnggngcn

SEQ ID NO: 3377 - DNA, 21 bp, Artificial Sequence
  Description of Artificial Sequence: Synthetic oligonucleotide
  modified_base (3)..(3): a, c, g, t, unknown or other
  modified_base (6)..(6): a, c, g, t, unknown or other
  modified_base (9)..(9): a, c, g, t, unknown or other
  modified_base (12)..(12): a, c, g, t, unknown or other
  modified_base (15)..(15): a, c, g, t, unknown or other
  modified_base (18)..(18): a, c, g, t, unknown or other
  modified_base (21)..(21): a, c, g, t, unknown or other
ggnggngcnggnggngcngcn

SEQ ID NO: 3378 - DNA, 21 bp, Artificial Sequence
  Description of Artificial Sequence: Synthetic oligonucleotide
  modified_base (3)..(3): a, c, g, t, unknown or other
  modified_base (6)..(6): a, c, g, t, unknown or other
  modified_base (9)..(9): a, c, g, t, unknown or other
  modified_base (12)..(12): a, c, g, t, unknown or other
  modified_base (15)..(15): a, c, g, t, unknown or other
  modified_base (18)..(18): a, c, g, t, unknown or other
  modified_base (21)..(21): a, c, g, t, unknown or other
ggnggnggngcngcngcnggn

SEQ ID NO: 3379 - DNA, 21 bp, Artificial Sequence
  Description of Artificial Sequence: Synthetic oligonucleotide
  modified_base (3)..(3): a, c, g, t, unknown or other
  modified_base (6)..(6): a, c, g, t, unknown or other
  modified_base (9)..(9): a, c, g, t, unknown or other
  modified_base (12)..(12): a, c, g, t, unknown or other
  modified_base (15)..(15): a, c, g, t, unknown or other
  modified_base (18)..(18): a, c, g, t, unknown or other
  modified_base (21)..(21): a, c, g, t, unknown or other
ggnggnggngcngcnggngcn

SEQ ID NO: 3380 - DNA, 21 bp, Artificial Sequence
  Description of Artificial Sequence: Synthetic oligonucleotide
  modified_base (3)..(3): a, c, g, t, unknown or other
  modified_base (6)..(6): a, c, g, t, unknown or other
  modified_base (9)..(9): a, c, g, t, unknown or other
  modified_base (12)..(12): a, c, g, t, unknown or other
  modified_base (15)..(15): a, c, g, t, unknown or other
  modified_base (18)..(18): a, c, g, t, unknown or other
  modified_base (21)..(21): a, c, g, t, unknown or other
ggnggnggngcnggngcngcn

SEQ ID NO: 3381 - DNA, 21 bp, Artificial Sequence
  Description of Artificial Sequence: Synthetic oligonucleotide
  modified_base (3)..(3): a, c, g, t, unknown or other
  modified_base (6)..(6): a, c, g, t, unknown or other
  modified_base (9)..(9): a, c, g, t, unknown or other
  modified_base (12)..(12): a, c, g, t, unknown or other
  modified_base (15)..(15): a, c, g, t, unknown or other
  modified_base (18)..(18): a, c, g, t, unknown or other
  modified_base (21)..(21): a, c, g, t, unknown or other
ggnggnggnggnggngcngcn

SEQ ID NO: 3382 - DNA, 21 bp, Artificial Sequence
  Description of Artificial Sequence: Synthetic oligonucleotide
  modified_base (3)..(3): a, c, g, t, unknown or other
  modified_base (6)..(6): a, c, g, t, unknown or other
  modified_base (9)..(9): a, c, g, t, unknown or other
  modified_base (12)..(12): a, c, g, t, unknown or other
  modified_base (15)..(15): a, c, g, t, unknown or other
  modified_base (18)..(18): a, c, g, t, unknown or other
  modified_base (21)..(21): a, c, g, t, unknown or other
gcngcnggnggnggnggnggn

SEQ ID NO: 3383 - DNA, 21 bp, Artificial Sequence
  Description of Artificial Sequence: Synthetic oligonucleotide
  modified_base (3)..(3): a, c, g, t, unknown or other
  modified_base (6)..(6): a, c, g, t, unknown or other
  modified_base (9)..(9): a, c, g, t, unknown or other
  modified_base (12)..(12): a, c, g, t, unknown or other
  modified_base (15)..(15): a, c, g, t, unknown or other
  modified_base (18)..(18): a, c, g, t, unknown or other
  modified_base (21)..(21): a, c, g, t, unknown or other
gcnggngcnggnggnggnggn

SEQ ID NO: 3384 - DNA, 21 bp, Artificial Sequence
  Description of Artificial Sequence: Synthetic oligonucleotide
  modified_base (3)..(3): a, c, g, t, unknown or other
  modified_base (6)..(6): a, c, g, t, unknown or other
  modified_base (9)..(9): a, c, g, t, unknown or other
  modified_base (12)..(12): a, c, g, t, unknown or other
  modified_base (15)..(15): a, c, g, t, unknown or other
  modified_base (18)..(18): a, c, g, t, unknown or other
  modified_base (21)..(21): a, c, g, t, unknown or other
gcnggnggngcnggnggnggn

SEQ ID NO: 3385 - DNA, 21 bp, Artificial Sequence
  Description of Artificial Sequence: Synthetic oligonucleotide
  modified_base (3)..(3): a, c, g, t, unknown or other
  modified_base (6)..(6): a, c, g, t, unknown or other
  modified_base (9)..(9): a, c, g, t, unknown or other
  modified_base (12)..(12): a, c, g, t, unknown or other
  modified_base (15)..(15): a, c, g, t, unknown or other
  modified_base (18)..(18): a, c, g, t, unknown or other
  modified_base (21)..(21): a, c, g, t, unknown or other
gcnggnggnggngcnggnggn

SEQ ID NO: 3386 - DNA, 21 bp, Artificial Sequence
  Description of Artificial Sequence: Synthetic oligonucleotide
  modified_base (3)..(3): a, c, g, t, unknown or other
  modified_base (6)..(6): a, c, g, t, unknown or other
  modified_base (9)..(9): a, c, g, t, unknown or other
  modified_base (12)..(12): a, c, g, t, unknown or other
  modified_base (15)..(15): a, c, g, t, unknown or other
  modified_base (18)..(18): a, c, g, t, unknown or other
  modified_base (21)..(21): a, c, g, t, unknown or other
gcnggnggnggnggngcnggn

SEQ ID NO: 3387 - DNA, 21 bp, Artificial Sequence
  Description of Artificial Sequence: Synthetic oligonucleotide
  modified_base (3)..(3): a, c, g, t, unknown or other
  modified_base (6)..(6): a, c, g, t, unknown or other
  modified_base (9)..(9): a, c, g, t, unknown or other
  modified_base (12)..(12): a, c, g, t, unknown or other
  modified_base (15)..(15): a, c, g, t, unknown or other
  modified_base (18)..(18): a, c, g, t, unknown or other
  modified_base (21)..(21): a, c, g, t, unknown or other
gcnggnggnggnggnggngcn

SEQ ID NO: 3388 - DNA, 21 bp, Artificial Sequence
  Description of Artificial Sequence: Synthetic oligonucleotide
  modified_base (3)..(3): a, c, g, t, unknown or other
  modified_base (6)..(6): a, c, g, t, unknown or other
  modified_base (9)..(9): a, c, g, t, unknown or other
  modified_base (12)..(12): a, c, g, t, unknown or other
  modified_base (15)..(15): a, c, g, t, unknown or other
  modified_base (18)..(18): a, c, g, t, unknown or other
  modified_base (21)..(21): a, c, g, t, unknown or other
ggngcngcnggnggnggnggn

SEQ ID NO: 3389 - DNA, 21 bp, Artificial Sequence
  Description of Artificial Sequence: Synthetic oligonucleotide
  modified_base (3)..(3): a, c, g, t, unknown or other
  modified_base (6)..(6): a, c, g, t, unknown or other
  modified_base (9)..(9): a, c, g, t, unknown or other
  modified_base (12)..(12): a, c, g, t, unknown or other
  modified_base (15)..(15): a, c, g, t, unknown or other
  modified_base (18)..(18): a, c, g, t, unknown or other
  modified_base (21)..(21): a, c, g, t, unknown or other
ggngcnggngcnggnggnggn

SEQ ID NO: 3390 - DNA, 21 bp, Artificial Sequence
  Description of Artificial Sequence: Synthetic oligonucleotide
  modified_base (3)..(3): a, c, g, t, unknown or other
  modified_base (6)..(6): a, c, g, t, unknown or other
  modified_base (9)..(9): a, c, g, t, unknown or other
  modified_base (12)..(12): a, c, g, t, unknown or other
  modified_base (15)..(15): a, c, g, t, unknown or other
  modified_base (18)..(18): a, c, g, t, unknown or other
  modified_base (21)..(21): a, c, g, t, unknown or other
ggngcnggnggngcnggnggn

SEQ ID NO: 3391 - DNA, 21 bp, Artificial Sequence
  Description of Artificial Sequence: Synthetic oligonucleotide
  modified_base (3)..(3): a, c, g, t, unknown or other
  modified_base (6)..(6): a, c, g, t, unknown or other
  modified_base (9)..(9): a, c, g, t, unknown or other
  modified_base (12)..(12): a, c, g, t, unknown or other
  modified_base (15)..(15): a, c, g, t, unknown or other
  modified_base (18)..(18): a, c, g, t, unknown or other
  modified_base (21)..(21): a, c, g, t, unknown or other
ggngcnggnggnggngcnggn

SEQ ID NO: 3392 - DNA, 21 bp, Artificial Sequence
  Description of Artificial Sequence: Synthetic oligonucleotide
  modified_base (3)..(3): a, c, g, t, unknown or other
  modified_base (6)..(6): a, c, g, t, unknown or other
  modified_base (9)..(9): a, c, g, t, unknown or other
  modified_base (12)..(12): a, c, g, t, unknown or other
  modified_base (15)..(15): a, c, g, t, unknown or other
  modified_base (18)..(18): a, c, g, t, unknown or other
  modified_base (21)..(21): a, c, g, t, unknown or other
ggngcnggnggnggnggngcn

SEQ ID NO: 3393 - DNA, 21 bp, Artificial Sequence
  Description of Artificial Sequence: Synthetic oligonucleotide
  modified_base (3)..(3): a, c, g, t, unknown or other
  modified_base (6)..(6): a, c, g, t, unknown or other
  modified_base (9)..(9): a, c, g, t, unknown or other
  modified_base (12)..(12): a, c, g, t, unknown or other
  modified_base (15)..(15): a, c, g, t, unknown or other
  modified_base (18)..(18): a, c, g, t, unknown or other
  modified_base (21)..(21): a, c, g, t, unknown or other
ggnggngcngcnggnggnggn

SEQ ID NO: 3394 - DNA, 21 bp, Artificial Sequence
  Description of Artificial Sequence: Synthetic oligonucleotide
  modified_base (3)..(3): a, c, g, t, unknown or other
  modified_base (6)..(6): a, c, g, t, unknown or other
  modified_base (9)..(9): a, c, g, t, unknown or other
  modified_base (12)..(12): a, c, g, t, unknown or other
  modified_base (15)..(15): a, c, g, t, unknown or other
  modified_base (18)..(18): a, c, g, t, unknown or other
  modified_base (21)..(21): a, c, g, t, unknown or other
ggnggngcnggngcnggnggn

SEQ ID NO: 3395 - DNA, 21 bp, Artificial Sequence
  Description of Artificial Sequence: Synthetic oligonucleotide
  modified_base (3)..(3): a, c, g, t, unknown or other
  modified_base (6)..(6): a, c, g, t, unknown or other
  modified_base (9)..(9): a, c, g, t, unknown or other
  modified_base (12)..(12): a, c, g, t, unknown or other
  modified_base (15)..(15): a, c, g, t, unknown or other
  modified_base (18)..(18): a, c, g, t, unknown or other
  modified_base (21)..(21): a, c, g, t, unknown or other
ggnggngcnggnggngcnggn

SEQ ID NO: 3396 - DNA, 21 bp, Artificial Sequence
  Description of Artificial Sequence: Synthetic oligonucleotide
  modified_base (3)..(3): a, c, g, t, unknown or other
  modified_base (6)..(6): a, c, g, t, unknown or other
  modified_base (9)..(9): a, c, g, t, unknown or other
  modified_base (12)..(12): a, c, g, t, unknown or other
  modified_base (15)..(15): a, c, g, t, unknown or other
  modified_base (18)..(18): a, c, g, t, unknown or other
  modified_base (21)..(21): a, c, g, t, unknown or other
ggnggngcnggnggnggngcn

SEQ ID NO: 3397 - DNA, 21 bp, Artificial Sequence
  Description of Artificial Sequence: Synthetic oligonucleotide
  modified_base (3)..(3): a, c, g, t, unknown or other
  modified_base (6)..(6): a, c, g, t, unknown or other
  modified_base (9)..(9): a, c, g, t, unknown or other
  modified_base (12)..(12): a, c, g, t, unknown or other
  modified_base (15)..(15): a, c, g, t, unknown or other
  modified_base (18)..(18): a, c, g, t, unknown or other
  modified_base (21)..(21): a, c, g, t, unknown or other
ggnggnggngcngcnggnggn

SEQ ID NO: 3398 - DNA, 21 bp, Artificial Sequence
  Description of Artificial Sequence: Synthetic oligonucleotide
  modified_base (3)..(3): a, c, g, t, unknown or other
  modified_base (6)..(6): a, c, g, t, unknown or other
  modified_base (9)..(9): a, c, g, t, unknown or other
  modified_base (12)..(12): a, c, g, t, unknown or other
  modified_base (15)..(15): a, c, g, t, unknown or other
  modified_base (18)..(18): a, c, g, t, unknown or other
  modified_base (21)..(21): a, c, g, t, unknown or other
ggnggnggngcnggngcnggn

SEQ ID NO: 3399 - DNA, 21 bp, Artificial Sequence
  Description of Artificial Sequence: Synthetic oligonucleotide
  modified_base (3)..(3): a, c, g, t, unknown or other
  modified_base (6)..(6): a, c, g, t, unknown or other
  modified_base (9)..(9): a, c, g, t, unknown or other
  modified_base (12)..(12): a, c, g, t, unknown or other
  modified_base (15)..(15): a, c, g, t, unknown or other
  modified_base (18)..(18): a, c, g, t, unknown or other
  modified_base (21)..(21): a, c, g, t, unknown or other
ggnggnggngcnggnggngcn

SEQ ID NO: 3400 - DNA, 21 bp, Artificial Sequence
  Description of Artificial Sequence: Synthetic oligonucleotide
  modified_base (3)..(3): a, c, g, t, unknown or other
  modified_base (6)..(6): a, c, g, t, unknown or other
  modified_base (9)..(9): a, c, g, t, unknown or other
  modified_base (12)..(12): a, c, g, t, unknown or other
  modified_base (15)..(15): a, c, g, t, unknown or other
  modified_base (18)..(18): a, c, g, t, unknown or other
  modified_base (21)..(21): a, c, g, t, unknown or other
ggnggnggnggngcngcnggn

SEQ ID NO: 3401 - DNA, 21 bp, Artificial Sequence
  Description of Artificial Sequence: Synthetic oligonucleotide
  modified_base (3)..(3): a, c, g, t, unknown or other
  modified_base (6)..(6): a, c, g, t, unknown or other
  modified_base (9)..(9): a, c, g, t, unknown or other
  modified_base (12)..(12): a, c, g, t, unknown or other
  modified_base (15)..(15): a, c, g, t, unknown or other
  modified_base (18)..(18): a, c, g, t, unknown or other
  modified_base (21)..(21): a, c, g, t, unknown or other
ggnggnggnggngcnggngcn

SEQ ID NO: 3402 - DNA, 21 bp, Artificial Sequence
  Description of Artificial Sequence: Synthetic oligonucleotide
  modified_base (3)..(3): a, c, g, t, unknown or other
  modified_base (6)..(6): a, c, g, t, unknown or other
  modified_base (9)..(9): a, c, g, t, unknown or other
  modified_base (12)..(12): a, c, g, t, unknown or other
  modified_base (15)..(15): a, c, g, t, unknown or other
  modified_base (18)..(18): a, c, g, t, unknown or other
  modified_base (21)..(21): a, c, g, t, unknown or other
ggnggnggnggnggnggngcn

SEQ ID NO: 3403 - DNA, 21 bp, Artificial Sequence
  Description of Artificial Sequence: Synthetic oligonucleotide
  modified_base (3)..(3): a, c, g, t, unknown or other
  modified_base (6)..(6): a, c, g, t, unknown or other
  modified_base (9)..(9): a, c, g, t, unknown or other
  modified_base (12)..(12): a, c, g, t, unknown or other
  modified_base (15)..(15): a, c, g, t, unknown or other
  modified_base (18)..(18): a, c, g, t, unknown or other
  modified_base (21)..(21): a, c, g, t, unknown or other
gcnggnggnggnggnggnggn

SEQ ID NO: 3404 - DNA, 21 bp, Artificial Sequence
  Description of Artificial Sequence: Synthetic oligonucleotide
  modified_base (3)..(3): a, c, g, t, unknown or other
  modified_base (6)..(6): a, c, g, t, unknown or other
  modified_base (9)..(9): a, c, g, t, unknown or other
  modified_base (12)..(12): a, c, g, t, unknown or other
  modified_base (15)..(15): a, c, g, t, unknown or other
  modified_base (18)..(18): a, c, g, t, unknown or other
  modified_base (21)..(21): a, c, g, t, unknown or other
ggngcnggnggnggnggnggn

SEQ ID NO: 3405 - DNA, 21 bp, Artificial Sequence
  Description of Artificial Sequence: Synthetic oligonucleotide
  modified_base (3)..(3): a, c, g, t, unknown or other
  modified_base (6)..(6): a, c, g, t, unknown or other
  modified_base (9)..(9): a, c, g, t, unknown or other
  modified_base (12)..(12): a, c, g, t, unknown or other
  modified_base (15)..(15): a, c, g, t, unknown or other
  modified_base (18)..(18): a, c, g, t, unknown or other
  modified_base (21)..(21): a, c, g, t, unknown or other
ggnggngcnggnggnggnggn

SEQ ID NO: 3406 - DNA, 21 bp, Artificial Sequence
  Description of Artificial Sequence: Synthetic oligonucleotide
  modified_base (3)..(3): a, c, g, t, unknown or other
  modified_base (6)..(6): a, c, g, t, unknown or other
  modified_base (9)..(9): a, c, g, t, unknown or other
  modified_base (12)..(12): a, c, g, t, unknown or other
  modified_base (15)..(15): a, c, g, t, unknown or other
  modified_base (18)..(18): a, c, g, t, unknown or other
  modified_base (21)..(21): a, c, g, t, unknown or other
ggnggnggngcnggnggnggn

SEQ ID NO: 3407 - DNA, 21 bp, Artificial Sequence
  Description of Artificial Sequence: Synthetic oligonucleotide
  modified_base (3)..(3): a, c, g, t, unknown or other
  modified_base (6)..(6): a, c, g, t, unknown or other
  modified_base (9)..(9): a, c, g, t, unknown or other
  modified_base (12)..(12): a, c, g, t, unknown or other
  modified_base (15)..(15): a, c, g, t, unknown or other
  modified_base (18)..(18): a, c, g, t, unknown or other
  modified_base (21)..(21): a, c, g, t, unknown or other
ggnggnggnggngcnggnggn

SEQ ID NO: 3408 - DNA, 21 bp, Artificial Sequence
  Description of Artificial Sequence: Synthetic oligonucleotide
  modified_base (3)..(3): a, c, g, t, unknown or other
  modified_base (6)..(6): a, c, g, t, unknown or other
  modified_base (9)..(9): a, c, g, t, unknown or other
  modified_base (12)..(12): a, c, g, t, unknown or other
  modified_base (15)..(15): a, c, g, t, unknown or other
  modified_base (18)..(18): a, c, g, t, unknown or other
  modified_base (21)..(21): a, c, g, t, unknown or other
ggnggnggnggnggngcnggn

SEQ ID NO: 3409 - DNA, 12 bp, Artificial Sequence
  Description of Artificial Sequence: Synthetic oligonucleotide
  modified_base (3)..(3): a, c, g, t, unknown or other
  modified_base (6)..(6): a, c, g, t, unknown or other
  modified_base (9)..(9): a, c, g, t, unknown or other
ggnggnggnagy

SEQ ID NO: 3410 - DNA, 12 bp, Artificial Sequence
  Description of Artificial Sequence: Synthetic oligonucleotide
  modified_base (6)..(6): a, c, g, t, unknown or other
  modified_base (9)..(9): a, c, g, t, unknown or other
  modified_base (12)..(12): a, c, g, t, unknown or other
agyggnggnggn

SEQ ID NO: 3411 - DNA, 12 bp, Artificial Sequence
  Description of Artificial Sequence: Synthetic oligonucleotide
  modified_base (3)..(3): a, c, g, t, unknown or other
  modified_base (9)..(9): a, c, g, t, unknown or other
  modified_base (12)..(12): a, c, g, t, unknown or other
ggnagyggnggn

SEQ ID NO: 3412 - DNA, 12 bp, Artificial Sequence
  Description of Artificial Sequence: Synthetic oligonucleotide
  modified_base (3)..(3): a, c, g, t, unknown or other
  modified_base (6)..(6): a, c, g, t, unknown or other
  modified_base (12)..(12): a, c, g, t, unknown or other
ggnggnagyggn

SEQ ID NO: 3413 - DNA, 15 bp, Artificial Sequence
  Description of Artificial Sequence: Synthetic oligonucleotide
  modified_base (3)..(3): a, c, g, t, unknown or other
  modified_base (6)..(6): a, c, g, t, unknown or other
  modified_base (9)..(9): a, c, g, t, unknown or other
  modified_base (12)..(12): a, c, g, t, unknown or other
ggnggnggnggnagy

SEQ ID NO: 3414 - DNA, 15 bp, Artificial Sequence
  Description of Artificial Sequence: Synthetic oligonucleotide
  modified_base (6)..(6): a, c, g, t, unknown or other
  modified_base (9)..(9): a, c, g, t, unknown or other
  modified_base (12)..(12): a, c, g, t, unknown or other
  modified_base (15)..(15): a, c, g, t, unknown or other
agyggnggnggnggn

SEQ ID NO: 3415 - DNA, 15 bp, Artificial Sequence
  Description of Artificial Sequence: Synthetic oligonucleotide
  modified_base (3)..(3): a, c, g, t, unknown or other
  modified_base (9)..(9): a, c, g, t, unknown or other
  modified_base (12)..(12): a, c, g, t, unknown or other
  modified_base (15)..(15): a, c, g, t, unknown or other
ggnagyggnggnggn

SEQ ID NO: 3416 - DNA, 15 bp, Artificial Sequence
  Description of Artificial Sequence: Synthetic oligonucleotide
  modified_base (3)..(3): a, c, g, t, unknown or other
  modified_base (6)..(6): a, c, g, t, unknown or other
  modified_base (12)..(12): a, c, g, t, unknown or other
  modified_base (15)..(15): a, c, g, t, unknown or other
ggnggnagyggnggn

SEQ ID NO: 3417 - DNA, 15 bp, Artificial Sequence
  Description of Artificial Sequence: Synthetic oligonucleotide
  modified_base (3)..(3): a, c, g, t, unknown or other
  modified_base (6)..(6): a, c, g, t, unknown or other
  modified_base (9)..(9): a, c, g, t, unknown or other
  modified_base (15)..(15): a, c, g, t, unknown or other
ggnggnggnagyggn

SEQ ID NO: 3418 - DNA, 15 bp, Artificial Sequence
  Description of Artificial Sequence: Synthetic oligonucleotide
  modified_base (3)..(3): a, c, g, t, unknown or other
  modified_base (6)..(6): a, c, g, t, unknown or other
  modified_base (9)..(9): a, c, g, t, unknown or other
ggnggnggnagyagy

SEQ ID NO: 3419 - DNA, 15 bp, Artificial Sequence
  Description of Artificial Sequence: Synthetic oligonucleotide
  modified_base (9)..(9): a, c, g, t, unknown or other
  modified_base (12)..(12): a, c, g, t, unknown or other
  modified_base (15)..(15): a, c, g, t, unknown or other
agyagyggnggnggn

SEQ ID NO: 3420 - DNA, 15 bp, Artificial Sequence
  Description of Artificial Sequence: Synthetic oligonucleotide
  modified_base (6)..(6): a, c, g, t, unknown or other
  modified_base (12)..(12): a, c, g, t, unknown or other
  modified_base (15)..(15): a, c, g, t, unknown or other
agyggnagyggnggn

SEQ ID NO: 3421 - DNA, 15 bp, Artificial Sequence
  Description of Artificial Sequence: Synthetic oligonucleotide
  modified_base (6)..(6): a, c, g, t, unknown or other
  modified_base (9)..(9): a, c, g, t, unknown or other
  modified_base (15)..(15): a, c, g, t, unknown or other
agyggnggnagyggn

SEQ ID NO: 3422 - DNA, 15 bp, Artificial Sequence
  Description of Artificial Sequence: Synthetic oligonucleotide
  modified_base (6)..(6): a, c, g, t, unknown or other
  modified_base (9)..(9): a, c, g, t, unknown or other
  modified_base (12)..(12): a, c, g, t, unknown or other
agyggnggnggnagy

SEQ ID NO: 3423 - DNA, 15 bp, Artificial Sequence
  Description of Artificial Sequence: Synthetic oligonucleotide
  modified_base (3)..(3): a, c, g, t, unknown or other
  modified_base (12)..(12): a, c, g, t, unknown or other
  modified_base (15)..(15): a, c, g, t, unknown or other
ggnagyagyggnggn

SEQ ID NO: 3424 - DNA, 15 bp, Artificial Sequence
  Description of Artificial Sequence: Synthetic oligonucleotide
  modified_base (3)..(3): a, c, g, t, unknown or other
  modified_base (9)..(9): a, c, g, t, unknown or other
  modified_base (15)..(15): a, c, g, t, unknown or other
ggnagyggnagyggn

SEQ ID NO: 3425 - DNA, 15 bp, Artificial Sequence
  Description of Artificial Sequence: Synthetic oligonucleotide
  modified_base (3)..(3): a, c, g, t, unknown or other
  modified_base (9)..(9): a, c, g, t, unknown or other
  modified_base (12)..(12): a, c, g, t, unknown or other
ggnagyggnggnagy

SEQ ID NO: 3426 - DNA, 15 bp, Artificial Sequence
  Description of Artificial Sequence: Synthetic oligonucleotide
  modified_base (3)..(3): a, c, g, t, unknown or other
  modified_base (6)..(6): a, c, g, t, unknown or other
  modified_base (15)..(15): a, c, g, t, unknown or other
ggnggnagyagyggn

SEQ ID NO: 3427 - DNA, 15 bp, Artificial Sequence
  Description of Artificial Sequence: Synthetic oligonucleotide
  modified_base (3)..(3): a, c, g, t, unknown or other
  modified_base (6)..(6): a, c, g, t, unknown or other
  modified_base (12)..(12): a, c, g, t, unknown or other
ggnggnagyggnagy

SEQ ID NO: 3428 - DNA, 18 bp, Artificial Sequence
  Description of Artificial Sequence: Synthetic oligonucleotide
  modified_base (3)..(3): a, c, g, t, unknown or other
  modified_base (6)..(6): a, c, g, t, unknown or other
  modified_base (9)..(9): a, c, g, t, unknown or other
  modified_base (12)..(12): a, c, g, t, unknown or other
  modified_base (15)..(15): a, c, g, t, unknown or other
ggnggnggnggnggnagy

SEQ ID NO: 3429 - DNA, 18 bp, Artificial Sequence
  Description of Artificial Sequence: Synthetic oligonucleotide
  modified_base (6)..(6): a, c, g, t, unknown or other
  modified_base (9)..(9): a, c, g, t, unknown or other
  modified_base (12)..(12): a, c, g, t, unknown or other
  modified_base (15)..(15): a, c, g, t, unknown or other
  modified_base (18)..(18): a, c, g, t, unknown or other
agyggnggnggnggnggn

SEQ ID NO: 3430 - DNA, 18 bp, Artificial Sequence
  Description of Artificial Sequence: Synthetic oligonucleotide
  modified_base (3)..(3): a, c, g, t, unknown or other
  modified_base (9)..(9): a, c, g, t, unknown or other
  modified_base (12)..(12): a, c, g, t, unknown or other
  modified_base (15)..(15): a, c, g, t, unknown or other
  modified_base (18)..(18): a, c, g, t, unknown or other
ggnagyggnggnggnggn

SEQ ID NO: 3431 - DNA, 18 bp, Artificial Sequence
  Description of Artificial Sequence: Synthetic oligonucleotide
  modified_base (3)..(3): a, c, g, t, unknown or other
  modified_base (6)..(6): a, c, g, t, unknown or other
  modified_base (12)..(12): a, c, g, t, unknown or other
  modified_base (15)..(15): a, c, g, t, unknown or other
  modified_base (18)..(18): a, c, g, t, unknown or other
ggnggnagyggnggnggn

SEQ ID NO: 3432 - DNA, 18 bp, Artificial Sequence
  Description of Artificial Sequence: Synthetic oligonucleotide
  modified_base (3)..(3): a, c, g, t, unknown or other
  modified_base (6)..(6): a, c, g, t, unknown or other
  modified_base (9)..(9): a, c, g, t, unknown or other
  modified_base (15)..(15): a, c, g, t, unknown or other
  modified_base (18)..(18): a, c, g, t, unknown or other
ggnggnggnagyggnggn

SEQ ID NO: 3433 - DNA, 18 bp, Artificial Sequence
  Description of Artificial Sequence: Synthetic oligonucleotide
  modified_base (3)..(3): a, c, g, t, unknown or other
  modified_base (6)..(6): a, c, g, t, unknown or other
  modified_base (9)..(9): a, c, g, t, unknown or other
  modified_base (12)..(12): a, c, g, t, unknown or other
  modified_base (18)..(18): a, c, g, t, unknown or other
ggnggnggnggnagyggn

SEQ ID NO: 3434 - DNA, 18 bp, Artificial Sequence
  Description of Artificial Sequence: Synthetic oligonucleotide
  modified_base (3)..(3): a, c, g, t, unknown or other
  modified_base (6)..(6): a, c, g, t, unknown or other
  modified_base (9)..(9): a, c, g, t, unknown or other
  modified_base (12)..(12): a, c, g, t, unknown or other
ggnggnggnggnagyagy

SEQ ID NO: 3435 - DNA, 18 bp, Artificial Sequence
  Description of Artificial Sequence: Synthetic oligonucleotide
  modified_base (9)..(9): a, c, g, t, unknown or other
  modified_base (12)..(12): a, c, g, t, unknown or other
  modified_base (15)..(15): a, c, g, t, unknown or other
  modified_base (18)..(18): a, c, g, t, unknown or other
agyagyggnggnggnggn

SEQ ID NO: 3436 - DNA, 18 bp, Artificial Sequence
  Description of Artificial Sequence: Synthetic oligonucleotide
  modified_base (6)..(6): a, c, g, t, unknown or other
  modified_base (12)..(12): a, c, g, t, unknown or other
  modified_base (15)..(15): a, c, g, t, unknown or other
  modified_base (18)..(18): a, c, g, t, unknown or other
agyggnagyggnggnggn

SEQ ID NO: 3437 - DNA, 18 bp, Artificial Sequence
  Description of Artificial Sequence: Synthetic oligonucleotide
  modified_base (6)..(6): a, c, g, t, unknown or other
  modified_base (9)..(9): a, c, g, t, unknown or other
  modified_base (15)..(15): a, c, g, t, unknown or other
  modified_base (18)..(18): a, c, g, t, unknown or other
agyggnggnagyggnggn

SEQ ID NO: 3438 - DNA, 18 bp, Artificial Sequence
  Description of Artificial Sequence: Synthetic oligonucleotide
  modified_base (6)..(6): a, c, g, t, unknown or other
  modified_base (9)..(9): a, c, g, t, unknown or other
  modified_base (12)..(12): a, c, g, t, unknown or other
  modified_base (18)..(18): a, c, g, t, unknown or other
agyggnggnggnagyggn

SEQ ID NO: 3439 - DNA, 18 bp, Artificial Sequence
  Description of Artificial Sequence: Synthetic oligonucleotide
  modified_base (6)..(6): a, c, g, t, unknown or other
  modified_base (9)..(9): a, c, g, t, unknown or other
  modified_base (12)..(12): a, c, g, t, unknown or other
  modified_base (15)..(15): a, c, g, t, unknown or other
agyggnggnggnggnagy

SEQ ID NO: 3440 - DNA, 18 bp, Artificial Sequence
  Description of Artificial Sequence: Synthetic oligonucleotide
  modified_base (3)..(3): a, c, g, t, unknown or other
  modified_base (12)..(12): a, c, g, t, unknown or other
  modified_base (15)..(15): a, c, g, t, unknown or other
  modified_base (18)..(18): a, c, g, t, unknown or other
ggnagyagyggnggnggn

SEQ ID NO: 3441 - DNA, 18 bp, Artificial Sequence
  Description of Artificial Sequence: Synthetic oligonucleotide
  modified_base (3)..(3): a, c, g, t, unknown or other
  modified_base (9)..(9): a, c, g, t, unknown or other
  modified_base (15)..(15): a, c, g, t, unknown or other
  modified_base (18)..(18): a, c, g, t, unknown or other
ggnagyggnagyggnggn

SEQ ID NO: 3442 - DNA, 18 bp, Artificial Sequence
  Description of Artificial Sequence: Synthetic oligonucleotide
  modified_base (3)..(3): a, c, g, t, unknown or other
  modified_base (9)..(9): a, c, g, t, unknown or other
  modified_base (12)..(12): a, c, g, t, unknown or other
  modified_base (18)..(18): a, c, g, t, unknown or other
ggnagyggnggnagyggn

SEQ ID NO: 3443 - DNA, 18 bp, Artificial Sequence
  Description of Artificial Sequence: Synthetic oligonucleotide
  modified_base (3)..(3): a, c, g, t, unknown or other
  modified_base (9)..(9): a, c, g, t, unknown or other
  modified_base (12)..(12): a, c, g, t, unknown or other
  modified_base (15)..(15): a, c, g, t, unknown or other
ggnagyggnggnggnagy

SEQ ID NO: 3444 - DNA, 18 bp, Artificial Sequence
  Description of Artificial Sequence: Synthetic oligonucleotide
  modified_base (3)..(3): a, c, g, t, unknown or other
  modified_base (6)..(6): a, c, g, t, unknown or other
  modified_base (15)..(15): a, c, g, t, unknown or other
  modified_base (18)..(18): a, c, g, t, unknown or other
ggnggnagyagyggnggn

SEQ ID NO: 3445 - DNA, 18 bp, Artificial Sequence
  Description of Artificial Sequence: Synthetic oligonucleotide
  modified_base (3)..(3): a, c, g, t, unknown or other
  modified_base (6)..(6): a, c, g, t, unknown or other
  modified_base (12)..(12): a, c, g, t, unknown or other
  modified_base (18)..(18): a, c, g, t, unknown or other
ggnggnagyggnagyggn

SEQ ID NO: 3446 - DNA, 18 bp, Artificial Sequence
  Description of Artificial Sequence: Synthetic oligonucleotide
  modified_base (3)..(3): a, c, g, t, unknown or other
  modified_base (6)..(6): a, c, g, t, unknown or other
  modified_base (12)..(12): a, c, g, t, unknown or other
  modified_base (15)..(15): a, c, g, t, unknown or other
ggnggnagyggnggnagy

SEQ ID NO: 3447 - DNA, 18 bp, Artificial Sequence
  Description of Artificial Sequence: Synthetic oligonucleotide
  modified_base (3)..(3): a, c, g, t, unknown or other
  modified_base (6)..(6): a, c, g, t, unknown or other
  modified_base (9)..(9): a, c, g, t, unknown or other
  modified_base (18)..(18): a, c, g, t, unknown or other
ggnggnggnagyagyggn

SEQ ID NO: 3448 - DNA, 18 bp, Artificial Sequence
  Description of Artificial Sequence: Synthetic oligonucleotide
  modified_base (3)..(3): a, c, g, t, unknown or other
  modified_base (6)..(6): a, c, g, t, unknown or other
  modified_base (9)..(9): a, c, g, t, unknown or other
  modified_base (15)..(15): a, c, g, t, unknown or other
ggnggnggnagyggnagy

SEQ ID NO: 3449 - DNA, 21 bp, Artificial Sequence
  Description of Artificial Sequence: Synthetic oligonucleotide
  modified_base (3)..(3): a, c, g, t, unknown or other
  modified_base (6)..(6): a, c, g, t, unknown or other
  modified_base (9)..(9): a, c, g, t, unknown or other
  modified_base (12)..(12): a, c, g, t, unknown or other
ggnggnggnggnagyagyagy

SEQ ID NO: 3450 - DNA, 21 bp, Artificial Sequence
  Description of Artificial Sequence: Synthetic oligonucleotide
  modified_base (12)..(12): a, c, g, t, unknown or other
  modified_base (15)..(15): a, c, g, t, unknown or other
  modified_base (18)..(18): a, c, g, t, unknown or other
  modified_base (21)..(21): a, c, g, t, unknown or other
agyagyagyggnggnggnggn

SEQ ID NO: 3451 - DNA, 21 bp, Artificial Sequence
  Description of Artificial Sequence: Synthetic oligonucleotide
  modified_base (6)..(6): a, c, g, t, unknown or other
  modified_base (15)..(15): a, c, g, t, unknown or other
  modified_base (18)..(18): a, c, g, t, unknown or other
  modified_base (21)..(21): a, c, g, t, unknown or other
agyggnagyagyggnggnggn

SEQ ID NO: 3452 - DNA, 21 bp, Artificial Sequence
  Description of Artificial Sequence: Synthetic oligonucleotide
  modified_base (6)..(6): a, c, g, t, unknown or other
  modified_base (12)..(12): a, c, g, t, unknown or other
  modified_base (18)..(18): a, c, g, t, unknown or other
  modified_base (21)..(21): a, c, g, t, unknown or other
agyggnagyggnagyggnggn

SEQ ID NO: 3453 - DNA, 21 bp, Artificial Sequence
  Description of Artificial Sequence: Synthetic oligonucleotide
  modified_base (6)..(6): a, c, g, t, unknown or other
  modified_base (12)..(12): a, c, g, t, unknown or other
  modified_base (15)..(15): a, c, g, t, unknown or other
  modified_base (21)..(21): a, c, g, t, unknown or other
agyggnagyggnggnagyggn

SEQ ID NO: 3454 - DNA, 21 bp, Artificial Sequence
  Description of Artificial Sequence: Synthetic oligonucleotide
  modified_base (6)..(6): a, c, g, t, unknown or other
  modified_base (12)..(12): a, c, g, t, unknown or other
  modified_base (15)..(15): a, c, g, t, unknown or other
  modified_base (18)..(18): a, c, g, t, unknown or other
agyggnagyggnggnggnagy

SEQ ID NO: 3455 - DNA, 21 bp, Artificial Sequence
  Description of Artificial Sequence: Synthetic oligonucleotide
  modified_base (6)..(6): a, c, g, t, unknown or other
  modified_base (9)..(9): a, c, g, t, unknown or other
  modified_base (18)..(18): a, c, g, t, unknown or other
  modified_base (21)..(21): a, c, g, t, unknown or other
agyggnggnagyagyggnggn

SEQ ID NO: 3456 - DNA, 21 bp, Artificial Sequence
  Description of Artificial Sequence: Synthetic oligonucleotide
  modified_base (6)..(6): a, c, g, t, unknown or other
  modified_base (9)..(9): a, c, g, t, unknown or other
  modified_base (15)..(15): a, c, g, t, unknown or other
  modified_base (21)..(21): a, c, g, t, unknown or other
agyggnggnagyggnagyggn

SEQ ID NO: 3457 - DNA, 21 bp, Artificial Sequence
  Description of Artificial Sequence: Synthetic oligonucleotide
  modified_base (6)..(6): a, c, g, t, unknown or other
  modified_base (9)..(9): a, c, g, t, unknown or other
  modified_base (15)..(15): a, c, g, t, unknown or other
  modified_base (18)..(18): a, c, g, t, unknown or other
agyggnggnagyggnggnagy

SEQ ID NO: 3458 - DNA, 21 bp, Artificial Sequence
  Description of Artificial Sequence: Synthetic oligonucleotide
  modified_base (6)..(6): a, c, g, t, unknown or other
  modified_base (9)..(9): a, c, g, t, unknown or other
  modified_base (12)..(12): a, c, g, t, unknown or other
  modified_base (18)..(18): a, c, g, t, unknown or other
agyggnggnggnagyggnagy

SEQ ID NO: 3459 - DNA, 21 bp, Artificial Sequence
  Description of Artificial Sequence: Synthetic oligonucleotide
  modified_base (6)..(6): a, c, g, t, unknown or other
  modified_base (9)..(9): a, c, g, t, unknown or other
  modified_base (12)..(12): a, c, g, t, unknown or other
  modified_base (21)..(21): a, c, g, t, unknown or other
agyggnggnggnagyagyggn

SEQ ID NO: 3460 - DNA, 21 bp, Artificial Sequence
  Description of Artificial Sequence: Synthetic oligonucleotide
  modified_base (6)..(6): a, c, g, t, unknown or other
  modified_base (9)..(9): a, c, g, t, unknown or other
  modified_base (12)..(12): a, c, g, t, unknown or other
  modified_base (15)..(15): a, c, g, t, unknown or other
agyggnggnggnggnagyagy

SEQ ID NO: 3461 - DNA, 21 bp, Artificial Sequence
  Description of Artificial Sequence: Synthetic oligonucleotide
  modified_base (9)..(9): a, c, g, t, unknown or other
  modified_base (15)..(15): a, c, g, t, unknown or other
  modified_base (18)..(18): a, c, g, t, unknown or other
  modified_base (21)..(21): a, c, g, t, unknown or other
agyagyggnagyggnggnggn

SEQ ID NO: 3462 - DNA, 21 bp, Artificial Sequence
  Description of Artificial Sequence: Synthetic oligonucleotide
  modified_base (9)..(9): a, c, g, t, unknown or other
  modified_base (12)..(12): a, c, g, t, unknown or other
  modified_base (18)..(18): a, c, g, t, unknown or other
  modified_base (21)..(21): a, c, g, t, unknown or other
agyagyggnggnagyggnggn

SEQ ID NO: 3463 - DNA, 21 bp, Artificial Sequence
  Description of Artificial Sequence: Synthetic oligonucleotide
  modified_base (9)..(9): a, c, g, t, unknown or other
  modified_base (12)..(12): a, c, g, t, unknown or other
  modified_base (15)..(15): a, c, g, t, unknown or other
  modified_base (21)..(21): a, c, g, t, unknown or other
agyagyggnggnggnagyggn

SEQ ID NO: 3464 - DNA, 21 bp, Artificial Sequence
  Description of Artificial Sequence: Synthetic oligonucleotide
  modified_base (9)..(9): a, c, g, t, unknown or other
  modified_base (12)..(12): a, c, g, t, unknown or other
  modified_base (15)..(15): a, c, g, t, unknown or other
  modified_base (18)..(18): a, c, g, t, unknown or other
agyagyggnggnggnggnagy

SEQ ID NO: 3465 - DNA, 21 bp, Artificial Sequence
  Description of Artificial Sequence: Synthetic oligonucleotide
  modified_base (3)..(3): a, c, g, t, unknown or other
  modified_base (15)..(15): a, c, g, t, unknown or other
  modified_base (18)..(18): a, c, g, t, unknown or other
  modified_base (21)..(21): a, c, g, t, unknown or other
ggnagyagyagyggnggnggn

SEQ ID NO: 3466 - DNA, 21 bp, Artificial Sequence
  Description of Artificial Sequence: Synthetic oligonucleotide
  modified_base (3)..(3): a, c, g, t, unknown or other
  modified_base (12)..(12): a, c, g, t, unknown or other
  modified_base (18)..(18): a, c, g, t, unknown or other
  modified_base (21)..(21): a, c, g, t, unknown or other
ggnagyagyggnagyggnggn

SEQ ID NO: 3467 - DNA, 21 bp, Artificial Sequence
  Description of Artificial Sequence: Synthetic oligonucleotide
  modified_base (3)..(3): a, c, g, t, unknown or other
  modified_base (12)..(12): a, c, g, t, unknown or other
  modified_base (15)..(15): a, c, g, t, unknown or other
  modified_base (21)..(21): a, c, g, t, unknown or other
ggnagyagyggnggnagyggn

SEQ ID NO: 3468 - DNA, 21 bp, Artificial Sequence
  Description of Artificial Sequence: Synthetic oligonucleotide
  modified_base (3)..(3): a, c, g, t, unknown or other
  modified_base (12)..(12): a, c, g, t, unknown or other
  modified_base (15)..(15): a, c, g, t, unknown or other
  modified_base (18)..(18): a, c, g, t, unknown or other
ggnagyagyggnggnggnagy

SEQ ID NO: 3469 - DNA, 21 bp, Artificial Sequence
  Description of Artificial Sequence: Synthetic oligonucleotide
  modified_base (3)..(3): a, c, g, t, unknown or other
  modified_base (9)..(9): a, c, g, t, unknown or other
  modified_base (18)..(18): a, c, g, t, unknown or other
  modified_base (21)..(21): a, c, g, t, unknown or other
ggnagyggnagyagyggnggn

SEQ ID NO: 3470 - DNA, 21 bp, Artificial Sequence
  Description of Artificial Sequence: Synthetic oligonucleotide
  modified_base (3)..(3): a, c, g, t, unknown or other
  modified_base (9)..(9): a, c, g, t, unknown or other
  modified_base (12)..(12): a, c, g, t, unknown or other
  modified_base (21)..(21): a, c, g, t, unknown or other
ggnagyggnggnagyagyggn

SEQ ID NO: 3471 - DNA, 21 bp, Artificial Sequence
  Description of Artificial Sequence: Synthetic oligonucleotide
  modified_base (3)..(3): a, c, g, t, unknown or other
  modified_base (9)..(9): a, c, g, t, unknown or other
  modified_base (12)..(12): a, c, g, t, unknown or other
  modified_base (15)..(15): a, c, g, t, unknown or other
ggnagyggnggnggnagyagy

SEQ ID NO: 3472 - DNA, 21 bp, Artificial Sequence
  Description of Artificial Sequence: Synthetic oligonucleotide
  modified_base (3)..(3): a, c, g, t, unknown or other
  modified_base (9)..(9): a, c, g, t, unknown or other
  modified_base (15)..(15): a, c, g, t, unknown or other
  modified_base (21)..(21): a, c, g, t, unknown or other
ggnagyggnagyggnagyggn

SEQ ID NO: 3473 - DNA, 21 bp, Artificial Sequence
  Description of Artificial Sequence: Synthetic oligonucleotide
  modified_base (3)..(3): a, c, g, t, unknown or other
  modified_base (9)..(9): a, c, g, t, unknown or other
  modified_base (15)..(15): a, c, g, t, unknown or other
  modified_base (18)..(18): a, c, g, t, unknown or other
ggnagyggnagyggnggnagy

SEQ ID NO: 3474 - DNA, 21 bp, Artificial Sequence
  Description of Artificial Sequence: Synthetic oligonucleotide
  modified_base (3)..(3): a, c, g, t, unknown or other
  modified_base (9)..(9): a, c, g, t, unknown or other
  modified_base (12)..(12): a, c, g, t, unknown or other
  modified_base (18)..(18): a, c, g, t, unknown or other
ggnagyggnggnagyggnagy

SEQ ID NO: 3475 - DNA, 21 bp, Artificial Sequence
  Description of Artificial Sequence: Synthetic oligonucleotide
  modified_base (3)..(3): a, c, g, t, unknown or other
  modified_base (6)..(6): a, c, g, t, unknown or other
  modified_base (18)..(18): a, c, g, t, unknown or other
  modified_base (21)..(21): a, c, g, t, unknown or other
ggnggnagyagyagyggnggn

SEQ ID NO: 3476 - DNA, 21 bp, Artificial Sequence
  Description of Artificial Sequence: Synthetic oligonucleotide
  modified_base (3)..(3): a, c, g, t, unknown or other
  modified_base (6)..(6): a, c, g, t, unknown or other
  modified_base (15)..(15): a, c, g, t, unknown or other
  modified_base (21)..(21): a, c, g, t, unknown or other
ggnggnagyagyggnagyggn

SEQ ID NO: 3477 - DNA, 21 bp, Artificial Sequence
  Description of Artificial Sequence: Synthetic oligonucleotide
  modified_base (3)..(3): a, c, g, t, unknown or other
  modified_base (6)..(6): a, c, g, t, unknown or other
  modified_base (15)..(15): a, c, g, t, unknown or other
  modified_base (18)..(18): a, c, g, t, unknown or other
ggnggnagyagyggnggnagy

SEQ ID NO: 3478 - DNA, 21 bp, Artificial Sequence
  Description of Artificial Sequence: Synthetic oligonucleotide
  modified_base (3)..(3): a, c, g, t, unknown or other
  modified_base (6)..(6): a, c, g, t, unknown or other
  modified_base (12)..(12): a, c, g, t, unknown or other
  modified_base (21)..(21): a, c, g, t, unknown or other
ggnggnagyggnagyagyggn

SEQ ID NO: 3479 - DNA, 21 bp, Artificial Sequence
  Description of Artificial Sequence: Synthetic oligonucleotide
  modified_base (3)..(3): a, c, g, t, unknown or other
  modified_base (6)..(6): a, c, g, t, unknown or other
  modified_base (12)..(12): a, c, g, t, unknown or other
  modified_base (18)..(18): a, c, g, t, unknown or other
ggnggnagyggnagyggnagy

SEQ ID NO: 3480 - DNA, 21 bp, Artificial Sequence
  Description of Artificial Sequence: Synthetic oligonucleotide
  modified_base (3)..(3): a, c, g, t, unknown or other
  modified_base (6)..(6): a, c, g, t, unknown or other
  modified_base (12)..(12): a, c, g, t, unknown or other
  modified_base (15)..(15): a, c, g, t, unknown or other
ggnggnagyggnggnagyagy

SEQ ID NO: 3481 - DNA, 21 bp, Artificial Sequence
  Description of Artificial Sequence: Synthetic oligonucleotide
  modified_base (3)..(3): a, c, g, t, unknown or other
  modified_base (6)..(6): a, c, g, t, unknown or other
  modified_base (9)..(9): a, c, g, t, unknown or other
  modified_base (21)..(21): a, c, g, t, unknown or other
ggnggnggnagyagyagyggn

SEQ ID NO: 3482 - DNA, 21 bp, Artificial Sequence
  Description of Artificial Sequence: Synthetic oligonucleotide
  modified_base (3)..(3): a, c, g, t, unknown or other
  modified_base (6)..(6): a, c, g, t, unknown or other
  modified_base (9)..(9): a, c, g, t, unknown or other
  modified_base (18)..(18): a, c, g, t, unknown or other
ggnggnggnagyagyggnagy

SEQ ID NO: 3483 - DNA, 21 bp, Artificial Sequence
  Description of Artificial Sequence: Synthetic oligonucleotide
  modified_base (3)..(3): a, c, g, t, unknown or other
  modified_base (6)..(6): a, c, g, t, unknown or other
  modified_base (9)..(9): a, c, g, t, unknown or other
  modified_base (15)..(15): a, c, g, t, unknown or other
ggnggnggnagyggnagyagy

SEQ ID NO: 3484 - DNA, 21 bp, Artificial Sequence
  Description of Artificial Sequence: Synthetic oligonucleotide
  modified_base (3)..(3): a, c, g, t, unknown or other
  modified_base (6)..(6): a, c, g, t, unknown or other
  modified_base (9)..(9): a, c, g, t, unknown or other
  modified_base (12)..(12): a, c, g, t, unknown or other
  modified_base (15)..(15): a, c, g, t, unknown or other
ggnggnggnggnggnagyagy

SEQ ID NO: 3485 - DNA, 21 bp, Artificial Sequence
  Description of Artificial Sequence: Synthetic oligonucleotide
  modified_base (9)..(9): a, c, g, t, unknown or other
  modified_base (12)..(12): a, c, g, t, unknown or other
  modified_base (15)..(15): a, c, g, t, unknown or other
  modified_base (18)..(18): a, c, g, t, unknown or other
  modified_base (21)..(21): a, c, g, t, unknown or other
agyagyggnggnggnggnggn

SEQ ID NO: 3486 - DNA, 21 bp, Artificial Sequence
  Description of Artificial Sequence: Synthetic oligonucleotide
  modified_base (6)..(6): a, c, g, t, unknown or other
  modified_base (12)..(12): a, c, g, t, unknown or other
  modified_base (15)..(15): a, c, g, t, unknown or other
  modified_base (18)..(18): a, c, g, t, unknown or other
  modified_base (21)..(21): a, c, g, t, unknown or other
agyggnagyggnggnggnggn

SEQ ID NO: 3487 - DNA, 21 bp, Artificial Sequence
  Description of Artificial Sequence: Synthetic oligonucleotide
  modified_base (6)..(6): a, c, g, t, unknown or other
  modified_base (9)..(9): a, c, g, t, unknown or other
  modified_base (15)..(15): a, c, g, t, unknown or other
  modified_base (18)..(18): a, c, g, t, unknown or other
  modified_base (21)..(21): a, c, g, t, unknown or other
agyggnggnagyggnggnggn

SEQ ID NO: 3488 - DNA, 21 bp, Artificial Sequence
  Description of Artificial Sequence: Synthetic oligonucleotide
  modified_base (6)..(6): a, c, g, t, unknown or other
  modified_base (9)..(9): a, c, g, t, unknown or other
  modified_base (12)..(12): a, c, g, t, unknown or other
  modified_base (18)..(18): a, c, g, t, unknown or other
  modified_base (21)..(21): a, c, g, t, unknown or other
agyggnggnggnagyggnggn

SEQ ID NO: 3489 - DNA, 21 bp, Artificial Sequence
  Description of Artificial Sequence: Synthetic oligonucleotide
  modified_base (6)..(6): a, c, g, t, unknown or other
  modified_base (9)..(9): a, c, g, t, unknown or other
  modified_base (12)..(12): a, c, g, t, unknown or other
  modified_base (15)..(15): a, c, g, t, unknown or other
  modified_base (21)..(21): a, c, g, t, unknown or other
agyggnggnggnggnagyggn

SEQ ID NO: 3490 - DNA, 21 bp, Artificial Sequence
  Description of Artificial Sequence: Synthetic oligonucleotide
  modified_base (6)..(6): a, c, g, t, unknown or other
  modified_base (9)..(9): a, c, g, t, unknown or other
  modified_base (12)..(12): a, c, g, t, unknown or other
  modified_base (15)..(15): a, c, g, t, unknown or other
  modified_base (18)..(18): a, c, g, t, unknown or other
agyggnggnggnggnggnagy

SEQ ID NO: 3491 - DNA, 21 bp, Artificial Sequence
  Description of Artificial Sequence: Synthetic oligonucleotide
  modified_base (3)..(3): a, c, g, t, unknown or other
  modified_base (12)..(12): a, c, g, t, unknown or other
  modified_base (15)..(15): a, c, g, t, unknown or other
  modified_base (18)..(18): a, c, g, t, unknown or other
  modified_base (21)..(21): a, c, g, t, unknown or other
ggnagyagyggnggnggnggn

SEQ ID NO: 3492 - DNA, 21 bp, Artificial Sequence
  Description of Artificial Sequence: Synthetic oligonucleotide
  modified_base (3)..(3): a, c, g, t, unknown or other
  modified_base (9)..(9): a, c, g, t, unknown or other
  modified_base (15)..(15): a, c, g, t, unknown or other
  modified_base (18)..(18): a, c, g, t, unknown or other
  modified_base (21)..(21): a, c, g, t, unknown or other
ggnagyggnagyggnggnggn

SEQ ID NO: 3493 - DNA, 21 bp, Artificial Sequence
  Description of Artificial Sequence: Synthetic oligonucleotide
  modified_base (3)..(3): a, c, g, t, unknown or other
  modified_base (9)..(9): a, c, g, t, unknown or other
  modified_base (12)..(12): a, c, g, t, unknown or other
  modified_base (18)..(18): a, c, g, t, unknown or other
  modified_base (21)..(21): a, c, g, t, unknown or other
ggnagyggnggnagyggnggn

SEQ ID NO: 3494 - DNA, 21 bp, Artificial Sequence
  Description of Artificial Sequence: Synthetic oligonucleotide
  modified_base (3)..(3): a, c, g, t, unknown or other
  modified_base (9)..(9): a, c, g, t, unknown or other
  modified_base (12)..(12): a, c, g, t, unknown or other
  modified_base (15)..(15): a, c, g, t, unknown or other
  modified_base (21)..(21): a, c, g, t, unknown or other
ggnagyggnggnggnagyggn

SEQ ID NO: 3495 - DNA, 21 bp, Artificial Sequence
  Description of Artificial Sequence: Synthetic oligonucleotide
  modified_base (3)..(3): a, c, g, t, unknown or other
  modified_base (9)..(9): a, c, g, t, unknown or other
  modified_base (12)..(12): a, c, g, t, unknown or other
  modified_base (15)..(15): a, c, g, t, unknown or other
  modified_base (18)..(18): a, c, g, t, unknown or other
ggnagyggnggnggnggnagy

SEQ ID NO: 3496 - DNA, 21 bp, Artificial Sequence
  Description of Artificial Sequence: Synthetic oligonucleotide
  modified_base (3)..(3): a, c, g, t, unknown or other
  modified_base (6)..(6): a, c, g, t, unknown or other
  modified_base (15)..(15): a, c, g, t, unknown or other
  modified_base (18)..(18): a, c, g, t, unknown or other
  modified_base (21)..(21): a, c, g, t, unknown or other
ggnggnagyagyggnggnggn

SEQ ID NO: 3497 - DNA, 21 bp, Artificial Sequence
  Description of Artificial Sequence: Synthetic oligonucleotide
  modified_base (3)..(3): a, c, g, t, unknown or other
  modified_base (6)..(6): a, c, g, t, unknown or other
  modified_base (12)..(12): a, c, g, t, unknown or other
  modified_base (18)..(18): a, c, g, t, unknown or other
  modified_base (21)..(21): a, c, g, t, unknown or other
ggnggnagyggnagyggnggn

SEQ ID NO: 3498 - DNA, 21 bp, Artificial Sequence
  Description of Artificial Sequence: Synthetic oligonucleotide
  modified_base (3)..(3): a, c, g, t, unknown or other
  modified_base (6)..(6): a, c, g, t, unknown or other
  modified_base (12)..(12): a, c, g, t, unknown or other
  modified_base (15)..(15): a, c, g, t, unknown or other
  modified_base (21)..(21): a, c, g, t, unknown or other
ggnggnagyggnggnagyggn

SEQ ID NO: 3499 - DNA, 21 bp, Artificial Sequence
  Description of Artificial Sequence: Synthetic oligonucleotide
  modified_base (3)..(3): a, c, g, t, unknown or other
  modified_base (6)..(6): a, c, g, t, unknown or other
  modified_base (12)..(12): a, c, g, t, unknown or other
  modified_base (15)..(15): a, c, g, t, unknown or other
  modified_base (18)..(18): a, c, g, t, unknown or other
ggnggnagyggnggnggnagy

SEQ ID NO: 3500 - DNA, 21 bp, Artificial Sequence
  Description of Artificial Sequence: Synthetic oligonucleotide
  modified_base (3)..(3): a, c, g, t, unknown or other
  modified_base (6)..(6): a, c, g, t, unknown or other
  modified_base (9)..(9): a, c, g, t, unknown or other
  modified_base (18)..(18): a, c, g, t, unknown or other
  modified_base (21)..(21): a, c, g, t, unknown or other
ggnggnggnagyagyggnggn

SEQ ID NO: 3501 - DNA, 21 bp, Artificial Sequence
  Description of Artificial Sequence: Synthetic oligonucleotide
  modified_base (3)..(3): a, c, g, t, unknown or other
  modified_base (6)..(6): a, c, g, t, unknown or other
  modified_base (9)..(9): a, c, g, t, unknown or other
  modified_base (15)..(15): a, c, g, t, unknown or other
  modified_base (21)..(21): a, c, g, t, unknown or other
ggnggnggnagyggnagyggn

SEQ ID NO: 3502 - DNA, 21 bp, Artificial Sequence
  Description of Artificial Sequence: Synthetic oligonucleotide
  modified_base (3)..(3): a, c, g, t, unknown or other
  modified_base (6)..(6): a, c, g, t, unknown or other
  modified_base (9)..(9): a, c, g, t, unknown or other
  modified_base (15)..(15): a, c, g, t, unknown or other
  modified_base (18)..(18): a, c, g, t, unknown or other
ggnggnggnagyggnggnagy

SEQ ID NO: 3503 - DNA, 21 bp, Artificial Sequence
  Description of Artificial Sequence: Synthetic oligonucleotide
  modified_base (3)..(3): a, c, g, t, unknown or other
  modified_base (6)..(6): a, c, g, t, unknown or other
  modified_base (9)..(9): a, c, g, t, unknown or other
  modified_base (12)..(12): a, c, g, t, unknown or other
  modified_base (21)..(21): a, c, g, t, unknown or other
ggnggnggnggnagyagyggn

SEQ ID NO: 3504 - DNA, 21 bp, Artificial Sequence
  Description of Artificial Sequence: Synthetic oligonucleotide
  modified_base (3)..(3): a, c, g, t, unknown or other
  modified_base (6)..(6): a, c, g, t, unknown or other
  modified_base (9)..(9): a, c, g, t, unknown or other
  modified_base (12)..(12): a, c, g, t, unknown or other
  modified_base (18)..(18): a, c, g, t, unknown or other
ggnggnggnggnagyggnagy

SEQ ID NO: 3505 - DNA, 21 bp, Artificial Sequence
  Description of Artificial Sequence: Synthetic oligonucleotide
  modified_base (3)..(3): a, c, g, t, unknown or other
  modified_base (6)..(6): a, c, g, t, unknown or other
  modified_base (9)..(9): a, c, g, t, unknown or other
  modified_base (12)..(12): a, c, g, t, unknown or other
  modified_base (15)..(15): a, c, g, t, unknown or other
  modified_base (18)..(18): a, c, g, t, unknown or other
ggnggnggnggnggnggnagy

SEQ ID NO: 3506 - DNA, 21 bp, Artificial Sequence
  Description of Artificial Sequence: Synthetic oligonucleotide
  modified_base (6)..(6): a, c, g, t, unknown or other
  modified_base (9)..(9): a, c, g, t, unknown or other
  modified_base (12)..(12): a, c, g, t, unknown or other
  modified_base (15)..(15): a, c, g, t, unknown or other
  modified_base (18)..(18): a, c, g, t, unknown or other
  modified_base (21)..(21): a, c, g, t, unknown or other
agyggnggnggnggnggnggn

SEQ ID NO: 3507 - DNA, 21 bp, Artificial Sequence
  Description of Artificial Sequence: Synthetic oligonucleotide
  modified_base (3)..(3): a, c, g, t, unknown or other
  modified_base (9)..(9): a, c, g, t, unknown or other
  modified_base (12)..(12): a, c, g, t, unknown or other
  modified_base (15)..(15): a, c, g, t, unknown or other
  modified_base (18)..(18): a, c, g, t, unknown or other
  modified_base (21)..(21): a, c, g, t, unknown or other
ggnagyggnggnggnggnggn

SEQ ID NO: 3508 - DNA, 21 bp, Artificial Sequence
  Description of Artificial Sequence: Synthetic oligonucleotide
  modified_base (3)..(3): a, c, g, t, unknown or other
  modified_base (6)..(6): a, c, g, t, unknown or other
  modified_base (12)..(12): a, c, g, t, unknown or other
  modified_base (15)..(15): a, c, g, t, unknown or other
  modified_base (18)..(18): a, c, g, t, unknown or other
  modified_base (21)..(21): a, c, g, t, unknown or other
ggnggnagyggnggnggnggn

SEQ ID NO: 3509 - DNA, 21 bp, Artificial Sequence
  Description of Artificial Sequence: Synthetic oligonucleotide
  modified_base (3)..(3): a, c, g, t, unknown or other
  modified_base (6)..(6): a, c, g, t, unknown or other
  modified_base (9)..(9): a, c, g, t, unknown or other
  modified_base (15)..(15): a, c, g, t, unknown or other
  modified_base (18)..(18): a, c, g, t, unknown or other
  modified_base (21)..(21): a, c, g, t, unknown or other
ggnggnggnagyggnggnggn

SEQ ID NO: 3510 - DNA, 21 bp, Artificial Sequence
  Description of Artificial Sequence: Synthetic oligonucleotide
  modified_base (3)..(3): a, c, g, t, unknown or other
  modified_base (6)..(6): a, c, g, t, unknown or other
  modified_base (9)..(9): a, c, g, t, unknown or other
  modified_base (12)..(12): a, c, g, t, unknown or other
  modified_base (18)..(18): a, c, g, t, unknown or other
  modified_base (21)..(21): a, c, g, t, unknown or other
ggnggnggnggnagyggnggn

SEQ ID NO: 3511 - DNA, 21 bp, Artificial Sequence
  Description of Artificial Sequence: Synthetic oligonucleotide
  modified_base (3)..(3): a, c, g, t, unknown or other
  modified_base (6)..(6): a, c, g, t, unknown or other
  modified_base (9)..(9): a, c, g, t, unknown or other
  modified_base (12)..(12): a, c, g, t, unknown or other
  modified_base (15)..(15): a, c, g, t, unknown or other
  modified_base (21)..(21): a, c, g, t, unknown or other
ggnggnggnggnggnagyggn

SEQ ID NO: 3512 - DNA, 12 bp, Artificial Sequence
  Description of Artificial Sequence: Synthetic oligonucleotide
  modified_base (3)..(3): a, c, g, t, unknown or other
  modified_base (6)..(6): a, c, g, t, unknown or other
  modified_base (9)..(9): a, c, g, t, unknown or other
ggnggnggncar

SEQ ID NO: 3513 - DNA, 12 bp, Artificial Sequence
  Description of Artificial Sequence: Synthetic oligonucleotide
  modified_base (6)..(6): a, c, g, t, unknown or other
  modified_base (9)..(9): a, c, g, t, unknown or other
  modified_base (12)..(12): a, c, g, t, unknown or other
carggnggnggn

SEQ ID NO: 3514 - DNA, 12 bp, Artificial Sequence
  Description of Artificial Sequence: Synthetic oligonucleotide
  modified_base (3)..(3): a, c, g, t, unknown or other
  modified_base (9)..(9): a, c, g, t, unknown or other
  modified_base (12)..(12): a, c, g, t, unknown or other
ggncarggnggn

SEQ ID NO: 3515 - DNA, 12 bp, Artificial Sequence
  Description of Artificial Sequence: Synthetic oligonucleotide
  modified_base (3)..(3): a, c, g, t, unknown or other
  modified_base (6)..(6): a, c, g, t, unknown or other
  modified_base (12)..(12): a, c, g, t, unknown or other
ggnggncarggn

SEQ ID NO: 3516 - DNA, 15 bp, Artificial Sequence
  Description of Artificial Sequence: Synthetic oligonucleotide
  modified_base (3)..(3): a, c, g, t, unknown or other
  modified_base (6)..(6): a, c, g, t, unknown or other
  modified_base (9)..(9): a, c, g, t, unknown or other
  modified_base (12)..(12): a, c, g, t, unknown or other
ggnggnggnggncar

SEQ ID NO: 3517 - DNA, 15 bp, Artificial Sequence
  Description of Artificial Sequence: Synthetic oligonucleotide
  modified_base (6)..(6): a, c, g, t, unknown or other
  modified_base (9)..(9): a, c, g, t, unknown or other
  modified_base (12)..(12): a, c, g, t, unknown or other
  modified_base (15)..(15): a, c, g, t, unknown or other
carggnggnggnggn

SEQ ID NO: 3518 - DNA, 15 bp, Artificial Sequence
  Description of Artificial Sequence: Synthetic oligonucleotide
  modified_base (3)..(3): a, c, g, t, unknown or other
  modified_base (9)..(9): a, c, g, t, unknown or other
  modified_base (12)..(12): a, c, g, t, unknown or other
  modified_base (15)..(15): a, c, g, t, unknown or other
ggncarggnggnggn

SEQ ID NO: 3519 - DNA, 15 bp, Artificial Sequence
  Description of Artificial Sequence: Synthetic oligonucleotide
  modified_base (3)..(3): a, c, g, t, unknown or other
  modified_base (6)..(6): a, c, g, t, unknown or other
  modified_base (12)..(12): a, c, g, t, unknown or other
  modified_base (15)..(15): a, c, g, t, unknown or other
ggnggncarggnggn

SEQ ID NO: 3520 - DNA, 15 bp, Artificial Sequence
  Description of Artificial Sequence: Synthetic oligonucleotide
  modified_base (3)..(3): a, c, g, t, unknown or other
  modified_base (6)..(6): a, c, g, t, unknown or other
  modified_base (9)..(9): a, c, g, t, unknown or other
  modified_base (15)..(15): a, c, g, t, unknown or other
ggnggnggncarggn

SEQ ID NO: 3521 - DNA, 15 bp, Artificial Sequence
  Description of Artificial Sequence: Synthetic oligonucleotide
  modified_base (3)..(3): a, c, g, t, unknown or other
  modified_base (6)..(6): a, c, g, t, unknown or other
  modified_base (9)..(9): a, c, g, t, unknown or other
ggnggnggncarcar

SEQ ID NO: 3522 - DNA, 15 bp, Artificial Sequence
  Description of Artificial Sequence: Synthetic oligonucleotide
  modified_base (9)..(9): a, c, g, t, unknown or other
  modified_base (12)..(12): a, c, g, t, unknown or other
  modified_base (15)..(15): a, c, g, t, unknown or other
carcarggnggnggn

SEQ ID NO: 3523 - DNA, 15 bp, Artificial Sequence
  Description of Artificial Sequence: Synthetic oligonucleotide
  modified_base (6)..(6): a, c, g, t, unknown or other
  modified_base (12)..(12): a, c, g, t, unknown or other
  modified_base (15)..(15): a, c, g, t, unknown or other
carggncarggnggn

SEQ ID NO: 3524 - DNA, 15 bp, Artificial Sequence
  Description of Artificial Sequence: Synthetic oligonucleotide
  modified_base (6)..(6): a, c, g, t, unknown or other
  modified_base (9)..(9): a, c, g, t, unknown or other
  modified_base (15)..(15): a, c, g, t, unknown or other
carggnggncarggn

SEQ ID NO: 3525 - DNA, 15 bp, Artificial Sequence
  Description of Artificial Sequence: Synthetic oligonucleotide
  modified_base (6)..(6): a, c, g, t, unknown or other
  modified_base (9)..(9): a, c, g, t, unknown or other
  modified_base (12)..(12): a, c, g, t, unknown or other
carggnggnggncar

SEQ ID NO: 3526 - DNA, 15 bp, Artificial Sequence
  Description of Artificial Sequence: Synthetic oligonucleotide
  modified_base (3)..(3): a, c, g, t, unknown or other
  modified_base (12)..(12): a, c, g, t, unknown or other
  modified_base (15)..(15): a, c, g, t, unknown or other
ggncarcarggnggn

SEQ ID NO: 3527 - DNA, 15 bp, Artificial Sequence
  Description of Artificial Sequence: Synthetic oligonucleotide
  modified_base (3)..(3): a, c, g, t, unknown or other
  modified_base (9)..(9): a, c, g, t, unknown or other
  modified_base (15)..(15): a, c, g, t, unknown or other
ggncarggncarggn

SEQ ID NO: 3528 - DNA, 15 bp, Artificial Sequence
  Description of Artificial Sequence: Synthetic oligonucleotide
  modified_base (3)..(3): a, c, g, t, unknown or other
  modified_base (9)..(9): a, c, g, t, unknown or other
  modified_base (12)..(12): a, c, g, t, unknown or other
ggncarggnggncar

SEQ ID NO: 3529 - DNA, 15 bp, Artificial Sequence
  Description of Artificial Sequence: Synthetic oligonucleotide
  modified_base (3)..(3): a, c, g, t, unknown or other
  modified_base (6)..(6): a, c, g, t, unknown or other
  modified_base (15)..(15): a, c, g, t, unknown or other
ggnggncarcarggn

SEQ ID NO: 3530 - DNA, 15 bp, Artificial Sequence
  Description of Artificial Sequence: Synthetic oligonucleotide
  modified_base (3)..(3): a, c, g, t, unknown or other
  modified_base (6)..(6): a, c, g, t, unknown or other
  modified_base (12)..(12): a, c, g, t, unknown or other
ggnggncarggncar

SEQ ID NO: 3531 - DNA, 18 bp, Artificial Sequence
  Description of Artificial Sequence: Synthetic oligonucleotide
  modified_base (3)..(3): a, c, g, t, unknown or other
  modified_base (6)..(6): a, c, g, t, unknown or other
  modified_base (9)..(9): a, c, g, t, unknown or other
  modified_base (12)..(12): a, c, g, t, unknown or other
  modified_base (15)..(15): a, c, g, t, unknown or other
ggnggnggnggnggncar

SEQ ID NO: 3532 - DNA, 18 bp, Artificial Sequence
  Description of Artificial Sequence: Synthetic oligonucleotide
  modified_base (6)..(6): a, c, g, t, unknown or other
  modified_base (9)..(9): a, c, g, t, unknown or other
  modified_base (12)..(12): a, c, g, t, unknown or other
  modified_base (15)..(15): a, c, g, t, unknown or other
  modified_base (18)..(18): a, c, g, t, unknown or other
carggnggnggnggnggn

SEQ ID NO: 3533 - DNA, 18 bp, Artificial Sequence
  Description of Artificial Sequence: Synthetic oligonucleotide
  modified_base (3)..(3): a, c, g, t, unknown or other
  modified_base (9)..(9): a, c, g, t, unknown or other
  modified_base (12)..(12): a, c, g, t, unknown or other
  modified_base (15)..(15): a, c, g, t, unknown or other
  modified_base (18)..(18): a, c, g, t, unknown or other
ggncarggnggnggnggn

SEQ ID NO: 3534 - DNA, 18 bp, Artificial Sequence
  Description of Artificial Sequence: Synthetic oligonucleotide
  modified_base (3)..(3): a, c, g, t, unknown or other
  modified_base (6)..(6): a, c, g, t, unknown or other
  modified_base (12)..(12): a, c, g, t, unknown or other
  modified_base (15)..(15): a, c, g, t, unknown or other
  modified_base (18)..(18): a, c, g, t, unknown or other
ggnggncarggnggnggn

SEQ ID NO: 3535 - DNA, 18 bp, Artificial Sequence
  Description of Artificial Sequence: Synthetic oligonucleotide
  modified_base (3)..(3): a, c, g, t, unknown or other
  modified_base (6)..(6): a, c, g, t, unknown or other
  modified_base (9)..(9): a, c, g, t, unknown or other
  modified_base (15)..(15): a, c, g, t, unknown or other
  modified_base (18)..(18): a, c, g, t, unknown or other
ggnggnggncarggnggn

SEQ ID NO: 3536 - DNA, 18 bp, Artificial Sequence
  Description of Artificial Sequence: Synthetic oligonucleotide
  modified_base (3)..(3): a, c, g, t, unknown or other
  modified_base (6)..(6): a, c, g, t, unknown or other
  modified_base (9)..(9): a, c, g, t, unknown or other
  modified_base (12)..(12): a, c, g, t, unknown or other
  modified_base (18)..(18): a, c, g, t, unknown or other
ggnggnggnggncarggn

SEQ ID NO: 3537 - DNA, 18 bp, Artificial Sequence
  Description of Artificial Sequence: Synthetic oligonucleotide
  modified_base (3)..(3): a, c, g, t, unknown or other
  modified_base (6)..(6): a, c, g, t, unknown or other
  modified_base (9)..(9): a, c, g, t, unknown or other
  modified_base (12)..(12): a, c, g, t, unknown or other
ggnggnggnggncarcar

SEQ ID NO: 3538 - DNA, 18 bp, Artificial Sequence
  Description of Artificial Sequence: Synthetic oligonucleotide
  modified_base (9)..(9): a, c, g, t, unknown or other
  modified_base (12)..(12): a, c, g, t, unknown or other
  modified_base (15)..(15): a, c, g, t, unknown or other
  modified_base (18)..(18): a, c, g, t, unknown or other
carcarggnggnggnggn

SEQ ID NO: 3539 - DNA, 18 bp, Artificial Sequence
  Description of Artificial Sequence: Synthetic oligonucleotide
  modified_base (6)..(6): a, c, g, t, unknown or other
  modified_base (12)..(12): a, c, g, t, unknown or other
  modified_base (15)..(15): a, c, g, t, unknown or other
  modified_base (18)..(18): a, c, g, t, unknown or other
carggncarggnggnggn

SEQ ID NO: 3540 - DNA, 18 bp, Artificial Sequence
  Description of Artificial Sequence: Synthetic oligonucleotide
  modified_base (6)..(6): a, c, g, t, unknown or other
  modified_base (9)..(9): a, c, g, t, unknown or other
  modified_base (15)..(15): a, c, g, t, unknown or other
  modified_base (18)..(18): a, c, g, t, unknown or other
carggnggncarggnggn

SEQ ID NO: 3541 - DNA, 18 bp, Artificial Sequence
  Description of Artificial Sequence: Synthetic oligonucleotide
  modified_base (6)..(6): a, c, g, t, unknown or other
  modified_base (9)..(9): a, c, g, t, unknown or other
  modified_base (12)..(12): a, c, g, t, unknown or other
  modified_base (18)..(18): a, c, g, t, unknown or other
carggnggnggncarggn

SEQ ID NO: 3542 - DNA, 18 bp, Artificial Sequence
  Description of Artificial Sequence: Synthetic oligonucleotide
  modified_base (6)..(6): a, c, g, t, unknown or other
  modified_base (9)..(9): a, c, g, t, unknown or other
  modified_base (12)..(12): a, c, g, t, unknown or other
  modified_base (15)..(15): a, c, g, t, unknown or other
carggnggnggnggncar

SEQ ID NO: 3543 - DNA, 18 bp, Artificial Sequence
  Description of Artificial Sequence: Synthetic oligonucleotide
  modified_base (3)..(3): a, c, g, t, unknown or other
  modified_base (12)..(12): a, c, g, t, unknown or other
  modified_base (15)..(15): a, c, g, t, unknown or other
  modified_base (18)..(18): a, c, g, t, unknown or other
ggncarcarggnggnggn

SEQ ID NO: 3544 - DNA, 18 bp, Artificial Sequence
  Description of Artificial Sequence: Synthetic oligonucleotide
  modified_base (3)..(3): a, c, g, t, unknown or other
  modified_base (9)..(9): a, c, g, t, unknown or other
  modified_base (15)..(15): a, c, g, t, unknown or other
  modified_base (18)..(18): a, c, g, t, unknown or other
ggncarggncarggnggn

SEQ ID NO: 3545 - DNA, 18 bp, Artificial Sequence
  Description of Artificial Sequence: Synthetic oligonucleotide
  modified_base (3)..(3): a, c, g, t, unknown or other
  modified_base (9)..(9): a, c, g, t, unknown or other
  modified_base (12)..(12): a, c, g, t, unknown or other
  modified_base (18)..(18): a, c, g, t, unknown or other
ggncarggnggncarggn

SEQ ID NO: 3546 - DNA, 18 bp, Artificial Sequence
  Description of Artificial Sequence: Synthetic oligonucleotide
  modified_base (3)..(3): a, c, g, t, unknown or other
  modified_base (9)..(9): a, c, g, t, unknown or other
  modified_base (12)..(12): a, c, g, t, unknown or other
  modified_base (15)..(15): a, c, g, t, unknown or other
ggncarggnggnggncar

SEQ ID NO: 3547 - DNA, 18 bp, Artificial Sequence
  Description of Artificial Sequence: Synthetic oligonucleotide
  modified_base (3)..(3): a, c, g, t, unknown or other
  modified_base (6)..(6): a, c, g, t, unknown or other
  modified_base (15)..(15): a, c, g, t, unknown or other
  modified_base (18)..(18): a, c, g, t, unknown or other
ggnggncarcarggnggn

SEQ ID NO: 3548 - DNA, 18 bp, Artificial Sequence
  Description of Artificial Sequence: Synthetic oligonucleotide
  modified_base (3)..(3): a, c, g, t, unknown or other
  modified_base (6)..(6): a, c, g, t, unknown or other
  modified_base (12)..(12): a, c, g, t, unknown or other
  modified_base (18)..(18): a, c, g, t, unknown or other
ggnggncarggncarggn

SEQ ID NO: 3549 - DNA, 18 bp, Artificial Sequence
  Description of Artificial Sequence: Synthetic oligonucleotide
  modified_base (3)..(3): a, c, g, t, unknown or other
  modified_base (6)..(6): a, c, g, t, unknown or other
  modified_base (12)..(12): a, c, g, t, unknown or other
  modified_base (15)..(15): a, c, g, t, unknown or other
ggnggncarggnggncar

SEQ ID NO: 3550 - DNA, 18 bp, Artificial Sequence
  Description of Artificial Sequence: Synthetic oligonucleotide
  modified_base (3)..(3): a, c, g, t, unknown or other
  modified_base (6)..(6): a, c, g, t, unknown or other
  modified_base (9)..(9): a, c, g, t, unknown or other
  modified_base (18)..(18): a, c, g, t, unknown or other
ggnggnggncarcarggn

SEQ ID NO: 3551 - DNA, 18 bp, Artificial Sequence
  Description of Artificial Sequence: Synthetic oligonucleotide
  modified_base (3)..(3): a, c, g, t, unknown or other
  modified_base (6)..(6): a, c, g, t, unknown or other
  modified_base (9)..(9): a, c, g, t, unknown or other
  modified_base (15)..(15): a, c, g, t, unknown or other
ggnggnggncarggncar

SEQ ID NO: 3552 - DNA, 21 bp, Artificial Sequence
  Description of Artificial Sequence: Synthetic oligonucleotide
  modified_base (3)..(3): a, c, g, t, unknown or other
  modified_base (6)..(6): a, c, g, t, unknown or other
  modified_base (9)..(9): a, c, g, t, unknown or other
  modified_base (12)..(12): a, c, g, t, unknown or other
ggnggnggnggncarcarcar

SEQ ID NO: 3553 - DNA, 21 bp, Artificial Sequence
  Description of Artificial Sequence: Synthetic oligonucleotide
  modified_base (12)..(12): a, c, g, t, unknown or other
  modified_base (15)..(15): a, c, g, t, unknown or other
  modified_base (18)..(18): a, c, g, t, unknown or other
  modified_base (21)..(21): a, c, g, t, unknown or other
carcarcarggnggnggnggn

SEQ ID NO: 3554 - DNA, 21 bp, Artificial Sequence
  Description of Artificial Sequence: Synthetic oligonucleotide
  modified_base (6)..(6): a, c, g, t, unknown or other
  modified_base (15)..(15): a, c, g, t, unknown or other
  modified_base (18)..(18): a, c, g, t, unknown or other
  modified_base (21)..(21): a, c, g, t, unknown or other
carggncarcarggnggnggn

SEQ ID NO: 3555 - DNA, 21 bp, Artificial Sequence
  Description of Artificial Sequence: Synthetic oligonucleotide
  modified_base (6)..(6): a, c, g, t, unknown or other
  modified_base (12)..(12): a, c, g, t, unknown or other
  modified_base (18)..(18): a, c, g, t, unknown or other
  modified_base (21)..(21): a, c, g, t, unknown or other
carggncarggncarggnggn

SEQ ID NO: 3556 - DNA, 21 bp, Artificial Sequence
  Description of Artificial Sequence: Synthetic oligonucleotide
  modified_base (6)..(6): a, c, g, t, unknown or other
  modified_base (12)..(12): a, c, g, t, unknown or other
  modified_base (15)..(15): a, c, g, t, unknown or other
  modified_base (21)..(21): a, c, g, t, unknown or other
carggncarggnggncarggn

SEQ ID NO: 3557 - DNA, 21 bp, Artificial Sequence
  Description of Artificial Sequence: Synthetic oligonucleotide
  modified_base (6)..(6): a, c, g, t, unknown or other
  modified_base (12)..(12): a, c, g, t, unknown or other
  modified_base (15)..(15): a, c, g, t, unknown or other
  modified_base (18)..(18): a, c, g, t, unknown or other
carggncarggnggnggncar

SEQ ID NO: 3558 - DNA, 21 bp, Artificial Sequence
  Description of Artificial Sequence: Synthetic oligonucleotide
  modified_base (6)..(6): a, c, g, t, unknown or other
  modified_base (9)..(9): a, c, g, t, unknown or other
  modified_base (18)..(18): a, c, g, t, unknown or other
  modified_base (21)..(21): a, c, g, t, unknown or other
carggnggncarcarggnggn

SEQ ID NO: 3559 - DNA, 21 bp, Artificial Sequence
  Description of Artificial Sequence: Synthetic oligonucleotide
  modified_base (6)..(6): a, c, g, t, unknown or other
  modified_base (9)..(9): a, c, g, t, unknown or other
  modified_base (15)..(15): a, c, g, t, unknown or other
  modified_base (21)..(21): a, c, g, t, unknown or other
carggnggncarggncarggn

SEQ ID NO: 3560 - DNA, 21 bp, Artificial Sequence
  Description of Artificial Sequence: Synthetic oligonucleotide
  modified_base (6)..(6): a, c, g, t, unknown or other
  modified_base (9)..(9): a, c, g, t, unknown or other
  modified_base (15)..(15): a, c, g, t, unknown or other
  modified_base (18)..(18): a, c, g, t, unknown or other
carggnggncarggnggncar

SEQ ID NO: 3561 - DNA, 21 bp, Artificial Sequence
  Description of Artificial Sequence: Synthetic oligonucleotide
  modified_base (6)..(6): a, c, g, t, unknown or other
  modified_base (9)..(9): a, c, g, t, unknown or other
  modified_base (12)..(12): a, c, g, t, unknown or other
  modified_base (18)..(18): a, c, g, t, unknown or other
carggnggnggncarggncar

SEQ ID NO: 3562 - DNA, 21 bp, Artificial Sequence
  Description of Artificial Sequence: Synthetic oligonucleotide
  modified_base (6)..(6): a, c, g, t, unknown or other
  modified_base (9)..(9): a, c, g, t, unknown or other
  modified_base (12)..(12): a, c, g, t, unknown or other
  modified_base (21)..(21): a, c, g, t, unknown or other
carggnggnggncarcarggn

SEQ ID NO: 3563 - DNA, 21 bp, Artificial Sequence
  Description of Artificial Sequence: Synthetic oligonucleotide
  modified_base (6)..(6): a, c, g, t, unknown or other
  modified_base (9)..(9): a, c, g, t, unknown or other
  modified_base (12)..(12): a, c, g, t, unknown or other
  modified_base (15)..(15): a, c, g, t, unknown or other
carggnggnggnggncarcar

SEQ ID NO: 3564 - DNA, 21 bp, Artificial Sequence
  Description of Artificial Sequence: Synthetic oligonucleotide
  modified_base (9)..(9): a, c, g, t, unknown or other
  modified_base (15)..(15): a, c, g, t, unknown or other
  modified_base (18)..(18): a, c, g, t, unknown or other
  modified_base (21)..(21): a, c, g, t, unknown or other
carcarggncarggnggnggn

SEQ ID NO: 3565 - DNA, 21 bp, Artificial Sequence
  Description of Artificial Sequence: Synthetic oligonucleotide
  modified_base (9)..(9): a, c, g, t, unknown or other
  modified_base (12)..(12): a, c, g, t, unknown or other
  modified_base (18)..(18): a, c, g, t, unknown or other
  modified_base (21)..(21): a, c, g, t, unknown or other
carcarggnggncarggnggn

SEQ ID NO: 3566 - DNA, 21 bp, Artificial Sequence
  Description of Artificial Sequence: Synthetic oligonucleotide
  modified_base (9)..(9): a, c, g, t, unknown or other
  modified_base (12)..(12): a, c, g, t, unknown or other
  modified_base (15)..(15): a, c, g, t, unknown or other
  modified_base (21)..(21): a, c, g, t, unknown or other
carcarggnggnggncarggn

SEQ ID NO: 3567 - DNA, 21 bp, Artificial Sequence
  Description of Artificial Sequence: Synthetic oligonucleotide
  modified_base (9)..(9): a, c, g, t, unknown or other
  modified_base (12)..(12): a, c, g, t, unknown or other
  modified_base (15)..(15): a, c, g, t, unknown or other
  modified_base (18)..(18): a, c, g, t, unknown or other
carcarggnggnggnggncar

SEQ ID NO: 3568 - DNA, 21 bp, Artificial Sequence
  Description of Artificial Sequence: Synthetic oligonucleotide
  modified_base (3)..(3): a, c, g, t, unknown or other
  modified_base (15)..(15): a, c, g, t, unknown or other
  modified_base (18)..(18): a, c, g, t, unknown or other
  modified_base (21)..(21): a, c, g, t, unknown or other
ggncarcarcarggnggnggn

SEQ ID NO: 3569 - DNA, 21 bp, Artificial Sequence
  Description of Artificial Sequence: Synthetic oligonucleotide
  modified_base (3)..(3): a, c, g, t, unknown or other
  modified_base (12)..(12): a, c, g, t, unknown or other
  modified_base (18)..(18): a, c, g, t, unknown or other
  modified_base (21)..(21): a, c, g, t, unknown or other
ggncarcarggncarggnggn

SEQ ID NO: 3570 - DNA, 21 bp, Artificial Sequence
  Description of Artificial Sequence: Synthetic oligonucleotide
  modified_base (3)..(3): a, c, g, t, unknown or other
  modified_base (12)..(12): a, c, g, t, unknown or other
  modified_base (15)..(15): a, c, g, t, unknown or other
  modified_base (21)..(21): a, c, g, t, unknown or other
ggncarcarggnggncarggn

SEQ ID NO: 3571 - DNA, 21 bp, Artificial Sequence
  Description of Artificial Sequence: Synthetic oligonucleotide
  modified_base (3)..(3): a, c, g, t, unknown or other
  modified_base (12)..(12): a, c, g, t, unknown or other
  modified_base (15)..(15): a, c, g, t, unknown or other
  modified_base (18)..(18): a, c, g, t, unknown or other
ggncarcarggnggnggncar

SEQ ID NO: 3572 - DNA, 21 bp, Artificial Sequence
  Description of Artificial Sequence: Synthetic oligonucleotide
  modified_base (3)..(3): a, c, g, t, unknown or other
  modified_base (9)..(9): a, c, g, t, unknown or other
  modified_base (18)..(18): a, c, g, t, unknown or other
  modified_base (21)..(21): a, c, g, t, unknown or other
ggncarggncarcarggnggn

SEQ ID NO: 3573 - DNA, 21 bp, Artificial Sequence
  Description of Artificial Sequence: Synthetic oligonucleotide
  modified_base (3)..(3): a, c, g, t, unknown or other
  modified_base (9)..(9): a, c, g, t, unknown or other
  modified_base (12)..(12): a, c, g, t, unknown or other
  modified_base (21)..(21): a, c, g, t, unknown or other
ggncarggnggncarcarggn

SEQ ID NO: 3574 - DNA, 21 bp, Artificial Sequence
  Description of Artificial Sequence: Synthetic oligonucleotide
  modified_base (3)..(3): a, c, g, t, unknown or other
  modified_base (9)..(9): a, c, g, t, unknown or other
  modified_base (12)..(12): a, c, g, t, unknown or other
  modified_base (15)..(15): a, c, g, t, unknown or other
ggncarggnggnggncarcar

SEQ ID NO: 3575 - DNA, 21 bp, Artificial Sequence
  Description of Artificial Sequence: Synthetic oligonucleotide
  modified_base (3)..(3): a, c, g, t, unknown or other
  modified_base (9)..(9): a, c, g, t, unknown or other
  modified_base (15)..(15): a, c, g, t, unknown or other
  modified_base (21)..(21): a, c, g, t, unknown or other
ggncarggncarggncarggn

SEQ ID NO: 3576 - DNA, 21 bp, Artificial Sequence
  Description of Artificial Sequence: Synthetic oligonucleotide
  modified_base (3)..(3): a, c, g, t, unknown or other
  modified_base (9)..(9): a, c, g, t, unknown or other
  modified_base (15)..(15): a, c, g, t, unknown or other
  modified_base (18)..(18): a, c, g, t, unknown or other
ggncarggncarggnggncar

SEQ ID NO: 3577 - DNA, 21 bp, Artificial Sequence
  Description of Artificial Sequence: Synthetic oligonucleotide
  modified_base (3)..(3): a, c, g, t, unknown or other
  modified_base (9)..(9): a, c, g, t, unknown or other
  modified_base (12)..(12): a, c, g, t, unknown or other
  modified_base (18)..(18): a, c, g, t, unknown or other
ggncarggnggncarggncar

SEQ ID NO: 3578 - DNA, 21 bp, Artificial Sequence
  Description of Artificial Sequence: Synthetic oligonucleotide
  modified_base (3)..(3): a, c, g, t, unknown or other
  modified_base (6)..(6): a, c, g, t, unknown or other
  modified_base (18)..(18): a, c, g, t, unknown or other
  modified_base (21)..(21): a, c, g, t, unknown or other
ggnggncarcarcarggnggn

SEQ ID NO: 3579 - DNA, 21 bp, Artificial Sequence
  Description of Artificial Sequence: Synthetic oligonucleotide
  modified_base (3)..(3): a, c, g, t, unknown or other
  modified_base (6)..(6): a, c, g, t, unknown or other
  modified_base (15)..(15): a, c, g, t, unknown or other
  modified_base (21)..(21): a, c, g, t, unknown or other
ggnggncarcarggncarggn

SEQ ID NO: 3580 - DNA, 21 bp, Artificial Sequence
  Description of Artificial Sequence: Synthetic oligonucleotide
  modified_base (3)..(3): a, c, g, t, unknown or other
  modified_base (6)..(6): a, c, g, t, unknown or other
  modified_base (15)..(15): a, c, g, t, unknown or other
  modified_base (18)..(18): a, c, g, t, unknown or other
ggnggncarcarggnggncar

SEQ ID NO: 3581 - DNA, 21 bp, Artificial Sequence
  Description of Artificial Sequence: Synthetic oligonucleotide
  modified_base (3)..(3): a, c, g, t, unknown or other
  modified_base (6)..(6): a, c, g, t, unknown or other
  modified_base (12)..(12): a, c, g, t, unknown or other
  modified_base (21)..(21): a, c, g, t, unknown or other
ggnggncarggncarcarggn

SEQ ID NO: 3582 - DNA, 21 bp, Artificial Sequence
  Description of Artificial Sequence: Synthetic oligonucleotide
  modified_base (3)..(3): a, c, g, t, unknown or other
  modified_base (6)..(6): a, c, g, t, unknown or other
  modified_base (12)..(12): a, c, g, t, unknown or other
  modified_base (18)..(18): a, c, g, t, unknown or other
ggnggncarggncarggncar

SEQ ID NO: 3583 - DNA, 21 bp, Artificial Sequence
  Description of Artificial Sequence: Synthetic oligonucleotide
  modified_base (3)..(3): a, c, g, t, unknown or other
  modified_base (6)..(6): a, c, g, t, unknown or other
  modified_base (12)..(12): a, c, g, t, unknown or other
  modified_base (15)..(15): a, c, g, t, unknown or other
ggnggncarggnggncarcar

SEQ ID NO: 3584 - DNA, 21 bp, Artificial Sequence
  Description of Artificial Sequence: Synthetic oligonucleotide
  modified_base (3)..(3): a, c, g, t, unknown or other
  modified_base (6)..(6): a, c, g, t, unknown or other
  modified_base (9)..(9): a, c, g, t, unknown or other
  modified_base (21)..(21): a, c, g, t, unknown or other
ggnggnggncarcarcarggn

SEQ ID NO: 3585 - DNA, 21 bp, Artificial Sequence
  Description of Artificial Sequence: Synthetic oligonucleotide
  modified_base (3)..(3): a, c, g, t, unknown or other
  modified_base (6)..(6): a, c, g, t, unknown or other
  modified_base (9)..(9): a, c, g, t, unknown or other
  modified_base (18)..(18): a, c, g, t, unknown or other
ggnggnggncarcarggncar

SEQ ID NO: 3586 - DNA, 21 bp, Artificial Sequence
  Description of Artificial Sequence: Synthetic oligonucleotide
  modified_base (3)..(3): a, c, g, t, unknown or other
  modified_base (6)..(6): a, c, g, t, unknown or other
  modified_base (9)..(9): a, c, g, t, unknown or other
  modified_base (15)..(15): a, c, g, t, unknown or other
ggnggnggncarggncarcar

SEQ ID NO: 3587 - DNA, 21 bp, Artificial Sequence
  Description of Artificial Sequence: Synthetic oligonucleotide
  modified_base (3)..(3): a, c, g, t, unknown or other
  modified_base (6)..(6): a, c, g, t, unknown or other
  modified_base (9)..(9): a, c, g, t, unknown or other
  modified_base (12)..(12): a, c, g, t, unknown or other
  modified_base (15)..(15): a, c, g, t, unknown or other
ggnggnggnggnggncarcar

SEQ ID NO: 3588 - DNA, 21 bp, Artificial Sequence
  Description of Artificial Sequence: Synthetic oligonucleotide
  modified_base (9)..(9): a, c, g, t, unknown or other
  modified_base (12)..(12): a, c, g, t, unknown or other
  modified_base (15)..(15): a, c, g, t, unknown or other
  modified_base (18)..(18): a, c, g, t, unknown or other
  modified_base (21)..(21): a, c, g, t, unknown or other
carcarggnggnggnggnggn

SEQ ID NO: 3589 - DNA, 21 bp, Artificial Sequence
  Description of Artificial Sequence: Synthetic oligonucleotide
  modified_base (6)..(6): a, c, g, t, unknown or other
  modified_base (12)..(12): a, c, g, t, unknown or other
  modified_base (15)..(15): a, c, g, t, unknown or other
  modified_base (18)..(18): a, c, g, t, unknown or other
  modified_base (21)..(21): a, c, g, t, unknown or other
carggncarggnggnggnggn

SEQ ID NO: 3590 - DNA, 21 bp, Artificial Sequence
  Description of Artificial Sequence: Synthetic oligonucleotide
  modified_base (6)..(6): a, c, g, t, unknown or other
  modified_base (9)..(9): a, c, g, t, unknown or other
  modified_base (15)..(15): a, c, g, t, unknown or other
  modified_base (18)..(18): a, c, g, t, unknown or other
  modified_base (21)..(21): a, c, g, t, unknown or other
carggnggncarggnggnggn

SEQ ID NO: 3591 - DNA, 21 bp, Artificial Sequence
  Description of Artificial Sequence: Synthetic oligonucleotide
  modified_base (6)..(6): a, c, g, t, unknown or other
  modified_base (9)..(9): a, c, g, t, unknown or other
  modified_base (12)..(12): a, c, g, t, unknown or other
  modified_base (18)..(18): a, c, g, t, unknown or other
  modified_base (21)..(21): a, c, g, t, unknown or other
carggnggnggncarggnggn

SEQ ID NO: 3592 - DNA, 21 bp, Artificial Sequence
  Description of Artificial Sequence: Synthetic oligonucleotide
  modified_base (6)..(6): a, c, g, t, unknown or other
  modified_base (9)..(9): a, c, g, t, unknown or other
  modified_base (12)..(12): a, c, g, t, unknown or other
  modified_base (15)..(15): a, c, g, t, unknown or other
  modified_base (21)..(21): a, c, g, t, unknown or other
carggnggnggnggncarggn

SEQ ID NO: 3593 - DNA, 21 bp, Artificial Sequence
  Description of Artificial Sequence: Synthetic oligonucleotide
  modified_base (6)..(6): a, c, g, t, unknown or other
  modified_base (9)..(9): a, c, g, t, unknown or other
  modified_base (12)..(12): a, c, g, t, unknown or other
  modified_base (15)..(15): a, c, g, t, unknown or other
  modified_base (18)..(18): a, c, g, t, unknown or other
carggnggnggnggnggncar

SEQ ID NO: 3594 - DNA, 21 bp, Artificial Sequence
  Description of Artificial Sequence: Synthetic oligonucleotide
  modified_base (3)..(3): a, c, g, t, unknown or other
  modified_base (12)..(12): a, c, g, t, unknown or other
  modified_base (15)..(15): a, c, g, t, unknown or other
  modified_base (18)..(18): a, c, g, t, unknown or other
  modified_base (21)..(21): a, c, g, t, unknown or other
ggncarcarggnggnggnggn

SEQ ID NO: 3595 - DNA, 21 bp, Artificial Sequence
  Description of Artificial Sequence: Synthetic oligonucleotide
  modified_base (3)..(3): a, c, g, t, unknown or other
  modified_base (9)..(9): a, c, g, t, unknown or other
  modified_base (15)..(15): a, c, g, t, unknown or other
  modified_base (18)..(18): a, c, g, t, unknown or other
  modified_base (21)..(21): a, c, g, t, unknown or other
ggncarggncarggnggnggn

SEQ ID NO: 3596 - DNA, 21 bp, Artificial Sequence
  Description of Artificial Sequence: Synthetic oligonucleotide
  modified_base (3)..(3): a, c, g, t, unknown or other
  modified_base (9)..(9): a, c, g, t, unknown or other
  modified_base (12)..(12): a, c, g, t, unknown or other
  modified_base (18)..(18): a, c, g, t, unknown or other
  modified_base (21)..(21): a, c, g, t, unknown or other
ggncarggnggncarggnggn

SEQ ID NO: 3597 - DNA, 21 bp, Artificial Sequence
  Description of Artificial Sequence: Synthetic oligonucleotide
  modified_base (3)..(3): a, c, g, t, unknown or other
  modified_base (9)..(9): a, c, g, t, unknown or other
  modified_base (12)..(12): a, c, g, t, unknown or other
  modified_base (15)..(15): a, c, g, t, unknown or other
  modified_base (21)..(21): a, c, g, t, unknown or other
ggncarggnggnggncarggn

SEQ ID NO: 3598 - DNA, 21 bp, Artificial Sequence
  Description of Artificial Sequence: Synthetic oligonucleotide
  modified_base (3)..(3): a, c, g, t, unknown or other
  modified_base (9)..(9): a, c, g, t, unknown or other
  modified_base (12)..(12): a, c, g, t, unknown or other
  modified_base (15)..(15): a, c, g, t, unknown or other
  modified_base (18)..(18): a, c, g, t, unknown or other
ggncarggnggnggnggncar

SEQ ID NO: 3599 - DNA, 21 bp, Artificial Sequence
  Description of Artificial Sequence: Synthetic oligonucleotide
  modified_base (3)..(3): a, c, g, t, unknown or other
  modified_base (6)..(6): a, c, g, t, unknown or other
  modified_base (15)..(15): a, c, g, t, unknown or other
  modified_base (18)..(18): a, c, g, t, unknown or other
  modified_base (21)..(21): a, c, g, t, unknown or other
ggnggncarcarggnggnggn

SEQ ID NO: 3600 - DNA, 21 bp, Artificial Sequence
  Description of Artificial Sequence: Synthetic oligonucleotide
  modified_base (3)..(3): a, c, g, t, unknown or other
  modified_base (6)..(6): a, c, g, t, unknown or other
  modified_base (12)..(12): a, c, g, t, unknown or other
  modified_base (18)..(18): a, c, g, t, unknown or other
  modified_base (21)..(21): a, c, g, t, unknown or other
ggnggncarggncarggnggn

SEQ ID NO: 3601 - DNA, 21 bp, Artificial Sequence
  Description of Artificial Sequence: Synthetic oligonucleotide
  modified_base (3)..(3): a, c, g, t, unknown or other
  modified_base (6)..(6): a, c, g, t, unknown or other
  modified_base (12)..(12): a, c, g, t, unknown or other
  modified_base (15)..(15): a, c, g, t, unknown or other
  modified_base (21)..(21): a, c, g, t, unknown or other
ggnggncarggnggncarggn

SEQ ID NO: 3602 - DNA, 21 bp, Artificial Sequence
  Description of Artificial Sequence: Synthetic oligonucleotide
  modified_base (3)..(3): a, c, g, t, unknown or other
  modified_base (6)..(6): a, c, g, t, unknown or other
  modified_base (12)..(12): a, c, g, t, unknown or other
  modified_base (15)..(15): a, c, g, t, unknown or other
  modified_base (18)..(18): a, c, g, t, unknown or other
ggnggncarggnggnggncar

SEQ ID NO: 3603 - DNA, 21 bp, Artificial Sequence
  Description of Artificial Sequence: Synthetic oligonucleotide
  modified_base (3)..(3): a, c, g, t, unknown or other
  modified_base (6)..(6): a, c, g, t, unknown or other
  modified_base (9)..(9): a, c, g, t, unknown or other
  modified_base (18)..(18): a, c, g, t, unknown or other
  modified_base (21)..(21): a, c, g, t, unknown or other
ggnggnggncarcarggnggn

SEQ ID NO: 3604 - DNA, 21 bp, Artificial Sequence
  Description of Artificial Sequence: Synthetic oligonucleotide
  modified_base (3)..(3): a, c, g, t, unknown or other
  modified_base (6)..(6): a, c, g, t, unknown or other
  modified_base (9)..(9): a, c, g, t, unknown or other
  modified_base (15)..(15): a, c, g, t, unknown or other
  modified_base (21)..(21): a, c, g, t, unknown or other
ggnggnggncarggncarggn

SEQ ID NO: 3605 - DNA, 21 bp, Artificial Sequence
  Description of Artificial Sequence: Synthetic oligonucleotide
  modified_base (3)..(3): a, c, g, t, unknown or other
  modified_base (6)..(6): a, c, g, t, unknown or other
  modified_base (9)..(9): a, c, g, t, unknown or other
  modified_base (15)..(15): a, c, g, t, unknown or other
  modified_base (18)..(18): a, c, g, t, unknown or other
ggnggnggncarggnggncar

SEQ ID NO: 3606 - DNA, 21 bp, Artificial Sequence
  Description of Artificial Sequence: Synthetic oligonucleotide
  modified_base (3)..(3): a, c, g, t, unknown or other
  modified_base (6)..(6): a, c, g, t, unknown or other
  modified_base (9)..(9): a, c, g, t, unknown or other
  modified_base (12)..(12): a, c, g, t, unknown or other
  modified_base (21)..(21): a, c, g, t, unknown or other
ggnggnggnggncarcarggn

SEQ ID NO: 3607 - DNA, 21 bp, Artificial Sequence
  Description of Artificial Sequence: Synthetic oligonucleotide
  modified_base (3)..(3): a, c, g, t, unknown or other
  modified_base (6)..(6): a, c, g, t, unknown or other
  modified_base (9)..(9): a, c, g, t, unknown or other
  modified_base (12)..(12): a, c, g, t, unknown or other
  modified_base (18)..(18): a, c, g, t, unknown or other
ggnggnggnggncarggncar

SEQ ID NO: 3608 - DNA, 21 bp, Artificial Sequence
  Description of Artificial Sequence: Synthetic oligonucleotide
  modified_base (3)..(3): a, c, g, t, unknown or other
  modified_base (6)..(6): a, c, g, t, unknown or other
  modified_base (9)..(9): a, c, g, t, unknown or other
  modified_base (12)..(12): a, c, g, t, unknown or other
  modified_base (15)..(15): a, c, g, t, unknown or other
  modified_base (18)..(18): a, c, g, t, unknown or other
ggnggnggnggnggnggncar

SEQ ID NO: 3609 - DNA, 21 bp, Artificial Sequence
  Description of Artificial Sequence: Synthetic oligonucleotide
  modified_base (6)..(6): a, c, g, t, unknown or other
  modified_base (9)..(9): a, c, g, t, unknown or other
  modified_base (12)..(12): a, c, g, t, unknown or other
  modified_base (15)..(15): a, c, g, t, unknown or other
  modified_base (18)..(18): a, c, g, t, unknown or other
  modified_base (21)..(21): a, c, g, t, unknown or other
carggnggnggnggnggnggn

SEQ ID NO: 3610 - DNA, 21 bp, Artificial Sequence
  Description of Artificial Sequence: Synthetic oligonucleotide
  modified_base (3)..(3): a, c, g, t, unknown or other
  modified_base (9)..(9): a, c, g, t, unknown or other
  modified_base (12)..(12): a, c, g, t, unknown or other
  modified_base (15)..(15): a, c, g, t, unknown or other
  modified_base (18)..(18): a, c, g, t, unknown or other
  modified_base (21)..(21): a, c, g, t, unknown or other
ggncarggnggnggnggnggn

SEQ ID NO: 3611 - DNA, 21 bp, Artificial Sequence
  Description of Artificial Sequence: Synthetic oligonucleotide
  modified_base (3)..(3): a, c, g, t, unknown or other
  modified_base (6)..(6): a, c, g, t, unknown or other
  modified_base (12)..(12): a, c, g, t, unknown or other
  modified_base (15)..(15): a, c, g, t, unknown or other
  modified_base (18)..(18): a, c, g, t, unknown or other
  modified_base (21)..(21): a, c, g, t, unknown or other
ggnggncarggnggnggnggn

SEQ ID NO: 3612 - DNA, 21 bp, Artificial Sequence
  Description of Artificial Sequence: Synthetic oligonucleotide
  modified_base (3)..(3): a, c, g, t, unknown or other
  modified_base (6)..(6): a, c, g, t, unknown or other
  modified_base (9)..(9): a, c, g, t, unknown or other
  modified_base (15)..(15): a, c, g, t, unknown or other
  modified_base (18)..(18): a, c, g, t, unknown or other
  modified_base (21)..(21): a, c, g, t, unknown or other
ggnggnggncarggnggnggn

SEQ ID NO: 3613 - DNA, 21 bp, Artificial Sequence
  Description of Artificial Sequence: Synthetic oligonucleotide
  modified_base (3)..(3): a, c, g, t, unknown or other
  modified_base (6)..(6): a, c, g, t, unknown or other
  modified_base (9)..(9): a, c, g, t, unknown or other
  modified_base (12)..(12): a, c, g, t, unknown or other
  modified_base (18)..(18): a, c, g, t, unknown or other
  modified_base (21)..(21): a, c, g, t, unknown or other
ggnggnggnggncarggnggn

SEQ ID NO: 3614 - DNA, 21 bp, Artificial Sequence
  Description of Artificial Sequence: Synthetic oligonucleotide
  modified_base (3)..(3): a, c, g, t, unknown or other
  modified_base (6)..(6): a, c, g, t, unknown or other
  modified_base (9)..(9): a, c, g, t, unknown or other
  modified_base (12)..(12): a, c, g, t, unknown or other
  modified_base (15)..(15): a, c, g, t, unknown or other
  modified_base (21)..(21): a, c, g, t, unknown or other
ggnggnggnggnggncarggn

SEQ ID NO: 3615 - DNA, 12 bp, Artificial Sequence
  Description of Artificial Sequence: Synthetic oligonucleotide
  modified_base (3)..(3): a, c, g, t, unknown or other
  modified_base (6)..(6): a, c, g, t, unknown or other
  modified_base (9)..(9): a, c, g, t, unknown or other
ggnggnggngar

SEQ ID NO: 3616 - DNA, 12 bp, Artificial Sequence
  Description of Artificial Sequence: Synthetic oligonucleotide
  modified_base (6)..(6): a, c, g, t, unknown or other
  modified_base (9)..(9): a, c, g, t, unknown or other
  modified_base (12)..(12): a, c, g, t, unknown or other
garggnggnggn

SEQ ID NO: 3617 - DNA, 12 bp, Artificial Sequence
  Description of Artificial Sequence: Synthetic oligonucleotide
  modified_base (3)..(3): a, c, g, t, unknown or other
  modified_base (9)..(9): a, c, g, t, unknown or other
  modified_base (12)..(12): a, c, g, t, unknown or other
ggngarggnggn

SEQ ID NO: 3618 - DNA, 12 bp, Artificial Sequence
  Description of Artificial Sequence: Synthetic oligonucleotide
  modified_base (3)..(3): a, c, g, t, unknown or other
  modified_base (6)..(6): a, c, g, t, unknown or other
  modified_base (12)..(12): a, c, g, t, unknown or other
ggnggngarggn

SEQ ID NO: 3619 - DNA, 15 bp, Artificial Sequence
  Description of Artificial Sequence: Synthetic oligonucleotide
  modified_base (3)..(3): a, c, g, t, unknown or other
  modified_base (6)..(6): a, c, g, t, unknown or other
  modified_base (9)..(9): a, c, g, t, unknown or other
  modified_base (12)..(12): a, c, g, t, unknown or other
ggnggnggnggngar

SEQ ID NO: 3620 - DNA, 15 bp, Artificial Sequence
  Description of Artificial Sequence: Synthetic oligonucleotide
  modified_base (6)..(6): a, c, g, t, unknown or other
  modified_base (9)..(9): a, c, g, t, unknown or other
  modified_base (12)..(12): a, c, g, t, unknown or other
  modified_base (15)..(15): a, c, g, t, unknown or other
garggnggnggnggn

SEQ ID NO: 3621 - DNA, 15 bp, Artificial Sequence
  Description of Artificial Sequence: Synthetic oligonucleotide
  modified_base (3)..(3): a, c, g, t, unknown or other
  modified_base (9)..(9): a, c, g, t, unknown or other
  modified_base (12)..(12): a, c, g, t, unknown or other
  modified_base (15)..(15): a, c, g, t, unknown or other
ggngarggnggnggn

SEQ ID NO: 3622 - DNA, 15 bp, Artificial Sequence
  Description of Artificial Sequence: Synthetic oligonucleotide
  modified_base (3)..(3): a, c, g, t, unknown or other
  modified_base (6)..(6): a, c, g, t, unknown or other
  modified_base (12)..(12): a, c, g, t, unknown or other
  modified_base (15)..(15): a, c, g, t, unknown or other
ggnggngarggnggn

SEQ ID NO: 3623 - DNA, 15 bp, Artificial Sequence
  Description of Artificial Sequence: Synthetic oligonucleotide
  modified_base (3)..(3): a, c, g, t, unknown or other
  modified_base (6)..(6): a, c, g, t, unknown or other
  modified_base (9)..(9): a, c, g, t, unknown or other
  modified_base (15)..(15): a, c, g, t, unknown or other
ggnggnggngarggn

SEQ ID NO: 3624 - DNA, 15 bp, Artificial Sequence
  Description of Artificial Sequence: Synthetic oligonucleotide
  modified_base (3)..(3): a, c, g, t, unknown or other
  modified_base (6)..(6): a, c, g, t, unknown or other
  modified_base (9)..(9): a, c, g, t, unknown or other
ggnggnggngargar

SEQ ID NO: 3625 - DNA, 15 bp, Artificial Sequence
  Description of Artificial Sequence: Synthetic oligonucleotide
  modified_base (9)..(9): a, c, g, t, unknown or other
  modified_base (12)..(12): a, c, g, t, unknown or other
  modified_base (15)..(15): a, c, g, t, unknown or other
gargarggnggnggn

SEQ ID NO: 3626 - DNA, 15 bp, Artificial Sequence
  Description of Artificial Sequence: Synthetic oligonucleotide
  modified_base (6)..(6): a, c, g, t, unknown or other
  modified_base (12)..(12): a, c, g, t, unknown or other
  modified_base (15)..(15): a, c, g, t, unknown or other
garggngarggnggn

SEQ ID NO: 3627 - DNA, 15 bp, Artificial Sequence
  Description of Artificial Sequence: Synthetic oligonucleotide
  modified_base (6)..(6): a, c, g, t, unknown or other
  modified_base (9)..(9): a, c, g, t, unknown or other
  modified_base (15)..(15): a, c, g, t, unknown or other
garggnggngarggn

SEQ ID NO: 3628 - DNA, 15 bp, Artificial Sequence
  Description of Artificial Sequence: Synthetic oligonucleotide
  modified_base (6)..(6): a, c, g, t, unknown or other
  modified_base (9)..(9): a, c, g, t, unknown or other
  modified_base (12)..(12): a, c, g, t, unknown or other
garggnggnggngar

SEQ ID NO: 3629 - DNA, 15 bp, Artificial Sequence
  Description of Artificial Sequence: Synthetic oligonucleotide
  modified_base (3)..(3): a, c, g, t, unknown or other
  modified_base (12)..(12): a, c, g, t, unknown or other
  modified_base (15)..(15): a, c, g, t, unknown or other
ggngargarggnggn

SEQ ID NO: 3630 - DNA, 15 bp, Artificial Sequence
  Description of Artificial Sequence: Synthetic oligonucleotide
  modified_base (3)..(3): a, c, g, t, unknown or other
  modified_base (9)..(9): a, c, g, t, unknown or other
  modified_base (15)..(15): a, c, g, t, unknown or other
ggngarggngarggn

SEQ ID NO: 3631 - DNA, 15 bp, Artificial Sequence
  Description of Artificial Sequence: Synthetic oligonucleotide
  modified_base (3)..(3): a, c, g, t, unknown or other
  modified_base (9)..(9): a, c, g, t, unknown or other
  modified_base (12)..(12): a, c, g, t, unknown or other
ggngarggnggngar

SEQ ID NO: 3632 - DNA, 15 bp, Artificial Sequence
  Description of Artificial Sequence: Synthetic oligonucleotide
  modified_base (3)..(3): a, c, g, t, unknown or other
  modified_base (6)..(6): a, c, g, t, unknown or other
  modified_base (15)..(15): a, c, g, t, unknown or other
ggnggngargarggn

SEQ ID NO: 3633 - DNA, 15 bp, Artificial Sequence
  Description of Artificial Sequence: Synthetic oligonucleotide
  modified_base (3)..(3): a, c, g, t, unknown or other
  modified_base (6)..(6): a, c, g, t, unknown or other
  modified_base (12)..(12): a, c, g, t, unknown or other
ggnggngarggngar

SEQ ID NO: 3634 - DNA, 18 bp, Artificial Sequence
  Description of Artificial Sequence: Synthetic oligonucleotide
  modified_base (3)..(3): a, c, g, t, unknown or other
  modified_base (6)..(6): a, c, g, t, unknown or other
  modified_base (9)..(9): a, c, g, t, unknown or other
  modified_base (12)..(12): a, c, g, t, unknown or other
  modified_base (15)..(15): a, c, g, t, unknown or other
ggnggnggnggnggngar

SEQ ID NO: 3635 - DNA, 18 bp, Artificial Sequence
  Description of Artificial Sequence: Synthetic oligonucleotide
  modified_base (6)..(6): a, c, g, t, unknown or other
  modified_base (9)..(9): a, c, g, t, unknown or other
  modified_base (12)..(12): a, c, g, t, unknown or other
  modified_base (15)..(15): a, c, g, t, unknown or other
  modified_base (18)..(18): a, c, g, t, unknown or other
garggnggnggnggnggn

SEQ ID NO: 3636 - DNA, 18 bp, Artificial Sequence
  Description of Artificial Sequence: Synthetic oligonucleotide
  modified_base (3)..(3): a, c, g, t, unknown or other
  modified_base (9)..(9): a, c, g, t, unknown or other
  modified_base (12)..(12): a, c, g, t, unknown or other
  modified_base (15)..(15): a, c, g, t, unknown or other
  modified_base (18)..(18): a, c, g, t, unknown or other
ggngarggnggnggnggn

SEQ ID NO: 3637 - DNA, 18 bp, Artificial Sequence
  Description of Artificial Sequence: Synthetic oligonucleotide
  modified_base (3)..(3): a, c, g, t, unknown or other
  modified_base (6)..(6): a, c, g, t, unknown or other
  modified_base (12)..(12): a, c, g, t, unknown or other
  modified_base (15)..(15): a, c, g, t, unknown or other
  modified_base (18)..(18): a, c, g, t, unknown or other
ggnggngarggnggnggn

SEQ ID NO: 3638 - DNA, 18 bp, Artificial Sequence
  Description of Artificial Sequence: Synthetic oligonucleotide
  modified_base (3)..(3): a, c, g, t, unknown or other
  modified_base (6)..(6): a, c, g, t, unknown or other
  modified_base (9)..(9): a, c, g, t, unknown or other
  modified_base (15)..(15): a, c, g, t, unknown or other
  modified_base (18)..(18): a, c, g, t, unknown or other
ggnggnggngarggnggn

SEQ ID NO: 3639 - DNA, 18 bp, Artificial Sequence
  Description of Artificial Sequence: Synthetic oligonucleotide
  modified_base (3)..(3): a, c, g, t, unknown or other
  modified_base (6)..(6): a, c, g, t, unknown or other
  modified_base (9)..(9): a, c, g, t, unknown or other
  modified_base (12)..(12): a, c, g, t, unknown or other
  modified_base (18)..(18): a, c, g, t, unknown or other
ggnggnggnggngarggn

SEQ ID NO: 3640 - DNA, 18 bp, Artificial Sequence
  Description of Artificial Sequence: Synthetic oligonucleotide
  modified_base (3)..(3): a, c, g, t, unknown or other
  modified_base (6)..(6): a, c, g, t, unknown or other
  modified_base (9)..(9): a, c, g, t, unknown or other
  modified_base (12)..(12): a, c, g, t, unknown or other
ggnggnggnggngargar

SEQ ID NO: 3641 - DNA, 18 bp, Artificial Sequence
  Description of Artificial Sequence: Synthetic oligonucleotide
  modified_base (9)..(9): a, c, g, t, unknown or other
  modified_base (12)..(12): a, c, g, t, unknown or other
  modified_base (15)..(15): a, c, g, t, unknown or other
  modified_base (18)..(18): a, c, g, t, unknown or other
gargarggnggnggnggn

SEQ ID NO: 3642 - DNA, 18 bp, Artificial Sequence
  Description of Artificial Sequence: Synthetic oligonucleotide
  modified_base (6)..(6): a, c, g, t, unknown or other
  modified_base (12)..(12): a, c, g, t, unknown or other
  modified_base (15)..(15): a, c, g, t, unknown or other
  modified_base (18)..(18): a, c, g, t, unknown or other
garggngarggnggnggn

SEQ ID NO: 3643 - DNA, 18 bp, Artificial Sequence
  Description of Artificial Sequence: Synthetic oligonucleotide
  modified_base (6)..(6): a, c, g, t, unknown or other
  modified_base (9)..(9): a, c, g, t, unknown or other
  modified_base (15)..(15): a, c, g, t, unknown or other
  modified_base (18)..(18): a, c, g, t, unknown or other
garggnggngarggnggn

SEQ ID NO: 3644 - DNA, 18 bp, Artificial Sequence
  Description of Artificial Sequence: Synthetic oligonucleotide
  modified_base (6)..(6): a, c, g, t, unknown or other
  modified_base (9)..(9): a, c, g, t, unknown or other
  modified_base (12)..(12): a, c, g, t, unknown or other
  modified_base (18)..(18): a, c, g, t, unknown or other
garggnggnggngarggn

SEQ ID NO: 3645 - DNA, 18 bp, Artificial Sequence
  Description of Artificial Sequence: Synthetic oligonucleotide
  modified_base (6)..(6): a, c, g, t, unknown or other
  modified_base (9)..(9): a, c, g, t, unknown or other
  modified_base (12)..(12): a, c, g, t, unknown or other
  modified_base (15)..(15): a, c, g, t, unknown or other
garggnggnggnggngar

SEQ ID NO: 3646 - DNA, 18 bp, Artificial Sequence
  Description of Artificial Sequence: Synthetic oligonucleotide
  modified_base (3)..(3): a, c, g, t, unknown or other
  modified_base (12)..(12): a, c, g, t, unknown or other
  modified_base (15)..(15): a, c, g, t, unknown or other
  modified_base (18)..(18): a, c, g, t, unknown or other
ggngargarggnggnggn

SEQ ID NO: 3647 - DNA, 18 bp, Artificial Sequence
  Description of Artificial Sequence: Synthetic oligonucleotide
  modified_base (3)..(3): a, c, g, t, unknown or other
  modified_base (9)..(9): a, c, g, t, unknown or other
  modified_base (15)..(15): a, c, g, t, unknown or other
  modified_base (18)..(18): a, c, g, t, unknown or other
ggngarggngarggnggn

SEQ ID NO: 3648 - DNA, 18 bp, Artificial Sequence
  Description of Artificial Sequence: Synthetic oligonucleotide
  modified_base (3)..(3): a, c, g, t, unknown or other
  modified_base (9)..(9): a, c, g, t, unknown or other
  modified_base (12)..(12): a, c, g, t, unknown or other
  modified_base (18)..(18): a, c, g, t, unknown or other
ggngarggnggngarggn

SEQ ID NO: 3649 - DNA, 18 bp, Artificial Sequence
  Description of Artificial Sequence: Synthetic oligonucleotide
  modified_base (3)..(3): a, c, g, t, unknown or other
  modified_base (9)..(9): a, c, g, t, unknown or other
  modified_base (12)..(12): a, c, g, t, unknown or other
  modified_base (15)..(15): a, c, g, t, unknown or other
ggngarggnggnggngar

SEQ ID NO: 3650 - DNA, 18 bp, Artificial Sequence
  Description of Artificial Sequence: Synthetic oligonucleotide
  modified_base (3)..(3): a, c, g, t, unknown or other
  modified_base (6)..(6): a, c, g, t, unknown or other
  modified_base (15)..(15): a, c, g, t, unknown or other
  modified_base (18)..(18): a, c, g, t, unknown or other
ggnggngargarggnggn

SEQ ID NO: 3651 - DNA, 18 bp, Artificial Sequence
  Description of Artificial Sequence: Synthetic oligonucleotide
  modified_base (3)..(3): a, c, g, t, unknown or other
  modified_base (6)..(6): a, c, g, t, unknown or other
  modified_base (12)..(12): a, c, g, t, unknown or other
  modified_base (18)..(18): a, c, g, t, unknown or other
ggnggngarggngarggn

SEQ ID NO: 3652 - DNA, 18 bp, Artificial Sequence
  Description of Artificial Sequence: Synthetic oligonucleotide
  modified_base (3)..(3): a, c, g, t, unknown or other
  modified_base (6)..(6): a, c, g, t, unknown or other
  modified_base (12)..(12): a, c, g, t, unknown or other
  modified_base (15)..(15): a, c, g, t, unknown or other
ggnggngarggnggngar

SEQ ID NO: 3653 - DNA, 18 bp, Artificial Sequence
  Description of Artificial Sequence: Synthetic oligonucleotide
  modified_base (3)..(3): a, c, g, t, unknown or other
  modified_base (6)..(6): a, c, g, t, unknown or other
  modified_base (9)..(9): a, c, g, t, unknown or other
  modified_base (18)..(18): a, c, g, t, unknown or other
ggnggnggngargarggn

SEQ ID NO: 3654 - DNA, 18 bp, Artificial Sequence
  Description of Artificial Sequence: Synthetic oligonucleotide
  modified_base (3)..(3): a, c, g, t, unknown or other
  modified_base (6)..(6): a, c, g, t, unknown or other
  modified_base (9)..(9): a, c, g, t, unknown or other
  modified_base (15)..(15): a, c, g, t, unknown or other
ggnggnggngarggngar

SEQ ID NO: 3655 - DNA, 21 bp, Artificial Sequence
  Description of Artificial Sequence: Synthetic oligonucleotide
  modified_base (3)..(3): a, c, g, t, unknown or other
  modified_base (6)..(6): a, c, g, t, unknown or other
  modified_base (9)..(9): a, c, g, t, unknown or other
  modified_base (12)..(12): a, c, g, t, unknown or other
ggnggnggnggngargargar

SEQ ID NO: 3656 - DNA, 21 bp, Artificial Sequence
  Description of Artificial Sequence: Synthetic oligonucleotide
  modified_base (12)..(12): a, c, g, t, unknown or other
  modified_base (15)..(15): a, c, g, t, unknown or other
  modified_base (18)..(18): a, c, g, t, unknown or other
  modified_base (21)..(21): a, c, g, t, unknown or other
gargargarggnggnggnggn

SEQ ID NO: 3657 - DNA, 21 bp, Artificial Sequence
  Description of Artificial Sequence: Synthetic oligonucleotide
  modified_base (6)..(6): a, c, g, t, unknown or other
  modified_base (15)..(15): a, c, g, t, unknown or other
  modified_base (18)..(18): a, c, g, t, unknown or other
  modified_base (21)..(21): a, c, g, t, unknown or other
garggngargarggnggnggn

SEQ ID NO: 3658 - DNA, 21 bp, Artificial Sequence
  Description of Artificial Sequence: Synthetic oligonucleotide
  modified_base (6)..(6): a, c, g, t, unknown or other
  modified_base (12)..(12): a, c, g, t, unknown or other
  modified_base (18)..(18): a, c, g, t, unknown or other
  modified_base (21)..(21): a, c, g, t, unknown or other
garggngarggngarggnggn

SEQ ID NO: 3659 - DNA, 21 bp, Artificial Sequence
  Description of Artificial Sequence: Synthetic oligonucleotide
  modified_base (6)..(6): a, c, g, t, unknown or other
  modified_base (12)..(12): a, c, g, t, unknown or other
  modified_base (15)..(15): a, c, g, t, unknown or other
  modified_base (21)..(21): a, c, g, t, unknown or other
garggngarggnggngarggn

SEQ ID NO: 3660 - DNA, 21 bp, Artificial Sequence
  Description of Artificial Sequence: Synthetic oligonucleotide
  modified_base (6)..(6): a, c, g, t, unknown or other
  modified_base (12)..(12): a, c, g, t, unknown or other
  modified_base (15)..(15): a, c, g, t, unknown or other
  modified_base (18)..(18): a, c, g, t, unknown or other
garggngarggnggnggngar

SEQ ID NO: 3661 - DNA, 21 bp, Artificial Sequence
  Description of Artificial Sequence: Synthetic oligonucleotide
  modified_base (6)..(6): a, c, g, t, unknown or other
  modified_base (9)..(9): a, c, g, t, unknown or other
  modified_base (18)..(18): a, c, g, t, unknown or other
  modified_base (21)..(21): a, c, g, t, unknown or other
garggnggngargarggnggn

SEQ ID NO: 3662 - DNA, 21 bp, Artificial Sequence
  Description of Artificial Sequence: Synthetic oligonucleotide
  modified_base (6)..(6): a, c, g, t, unknown or other
  modified_base (9)..(9): a, c, g, t, unknown or other
  modified_base (15)..(15): a, c, g, t, unknown or other
  modified_base (21)..(21): a, c, g, t, unknown or other
garggnggngarggngarggn

SEQ ID NO: 3663 - DNA, 21 bp, Artificial Sequence
  Description of Artificial Sequence: Synthetic oligonucleotide
  modified_base (6)..(6): a, c, g, t, unknown or other
  modified_base (9)..(9): a, c, g, t, unknown or other
  modified_base (15)..(15): a, c, g, t, unknown or other
  modified_base (18)..(18): a, c, g, t, unknown or other
garggnggngarggnggngar

SEQ ID NO: 3664 - DNA, 21 bp, Artificial Sequence
  Description of Artificial Sequence: Synthetic oligonucleotide
  modified_base (6)..(6): a, c, g, t, unknown or other
  modified_base (9)..(9): a, c, g, t, unknown or other
  modified_base (12)..(12): a, c, g, t, unknown or other
  modified_base (18)..(18): a, c, g, t, unknown or other
garggnggnggngarggngar

SEQ ID NO: 3665 - DNA, 21 bp, Artificial Sequence
  Description of Artificial Sequence: Synthetic oligonucleotide
  modified_base (6)..(6): a, c, g, t, unknown or other
  modified_base (9)..(9): a, c, g, t, unknown or other
  modified_base (12)..(12): a, c, g, t, unknown or other
  modified_base (21)..(21): a, c, g, t, unknown or other
garggnggnggngargarggn

SEQ ID NO: 3666 - DNA, 21 bp, Artificial Sequence
  Description of Artificial Sequence: Synthetic oligonucleotide
  modified_base (6)..(6): a, c, g, t, unknown or other
  modified_base (9)..(9): a, c, g, t, unknown or other
  modified_base (12)..(12): a, c, g, t, unknown or other
  modified_base (15)..(15): a, c, g, t, unknown or other
garggnggnggnggngargar

SEQ ID NO: 3667 - DNA, 21 bp, Artificial Sequence
  Description of Artificial Sequence: Synthetic oligonucleotide
  modified_base (9)..(9): a, c, g, t, unknown or other
  modified_base (15)..(15): a, c, g, t, unknown or other
  modified_base (18)..(18): a, c, g, t, unknown or other
  modified_base (21)..(21): a, c, g, t, unknown or other
gargarggngarggnggnggn

SEQ ID NO: 3668 - DNA, 21 bp, Artificial Sequence
  Description of Artificial Sequence: Synthetic oligonucleotide
  modified_base (9)..(9): a, c, g, t, unknown or other
  modified_base (12)..(12): a, c, g, t, unknown or other
  modified_base (18)..(18): a, c, g, t, unknown or other
  modified_base (21)..(21): a, c, g, t, unknown or other
gargarggnggngarggnggn

SEQ ID NO: 3669 - DNA, 21 bp, Artificial Sequence
  Description of Artificial Sequence: Synthetic oligonucleotide
  modified_base (9)..(9): a, c, g, t, unknown or other
  modified_base (12)..(12): a, c, g, t, unknown or other
  modified_base (15)..(15): a, c, g, t, unknown or other
  modified_base (21)..(21): a, c, g, t, unknown or other
gargarggnggnggngarggn

SEQ ID NO: 3670 - DNA, 21 bp, Artificial Sequence
  Description of Artificial Sequence: Synthetic oligonucleotide
  modified_base (9)..(9): a, c, g, t, unknown or other
  modified_base (12)..(12): a, c, g, t, unknown or other
  modified_base (15)..(15): a, c, g, t, unknown or other
  modified_base (18)..(18): a, c, g, t, unknown or other
gargarggnggnggnggngar

SEQ ID NO: 3671 - DNA, 21 bp, Artificial Sequence
  Description of Artificial Sequence: Synthetic oligonucleotide
  modified_base (3)..(3): a, c, g, t, unknown or other
  modified_base (15)..(15): a, c, g, t, unknown or other
  modified_base (18)..(18): a, c, g, t, unknown or other
  modified_base (21)..(21): a, c, g, t, unknown or other
ggngargargarggnggnggn

SEQ ID NO: 3672 - DNA, 21 bp, Artificial Sequence
  Description of Artificial Sequence: Synthetic oligonucleotide
  modified_base (3)..(3): a, c, g, t, unknown or other
  modified_base (12)..(12): a, c, g, t, unknown or other
  modified_base (18)..(18): a, c, g, t, unknown or other
  modified_base (21)..(21): a, c, g, t, unknown or other
ggngargarggngarggnggn

SEQ ID NO: 3673 - DNA, 21 bp, Artificial Sequence
  Description of Artificial Sequence: Synthetic oligonucleotide
  modified_base (3)..(3): a, c, g, t, unknown or other
  modified_base (12)..(12): a, c, g, t, unknown or other
  modified_base (15)..(15): a, c, g, t, unknown or other
  modified_base (21)..(21): a, c, g, t, unknown or other
ggngargarggnggngarggn

SEQ ID NO: 3674 - DNA, 21 bp, Artificial Sequence
  Description of Artificial Sequence: Synthetic oligonucleotide
  modified_base (3)..(3): a, c, g, t, unknown or other
  modified_base (12)..(12): a, c, g, t, unknown or other
  modified_base (15)..(15): a, c, g, t, unknown or other
  modified_base (18)..(18): a, c, g, t, unknown or other
ggngargarggnggnggngar

SEQ ID NO: 3675 - DNA, 21 bp, Artificial Sequence
  Description of Artificial Sequence: Synthetic oligonucleotide
  modified_base (3)..(3): a, c, g, t, unknown or other
  modified_base (9)..(9): a, c, g, t, unknown or other
  modified_base (18)..(18): a, c, g, t, unknown or other
  modified_base (21)..(21): a, c, g, t, unknown or other
ggngarggngargarggnggn

SEQ ID NO: 3676 - DNA, 21 bp, Artificial Sequence
  Description of Artificial Sequence: Synthetic oligonucleotide
  modified_base (3)..(3): a, c, g, t, unknown or other
  modified_base (9)..(9): a, c, g, t, unknown or other
  modified_base (12)..(12): a, c, g, t, unknown or other
  modified_base (21)..(21): a, c, g, t, unknown or other
ggngarggnggngargarggn

SEQ ID NO: 3677 - DNA, 21 bp, Artificial Sequence
  Description of Artificial Sequence: Synthetic oligonucleotide
  modified_base (3)..(3): a, c, g, t, unknown or other
  modified_base (9)..(9): a, c, g, t, unknown or other
  modified_base (12)..(12): a, c, g, t, unknown or other
  modified_base (15)..(15): a, c, g, t, unknown or other
ggngarggnggnggngargar

SEQ ID NO: 3678 - DNA, 21 bp, Artificial Sequence
  Description of Artificial Sequence: Synthetic oligonucleotide
  modified_base (3)..(3): a, c, g, t, unknown or other
  modified_base (9)..(9): a, c, g, t, unknown or other
  modified_base (15)..(15): a, c, g, t, unknown or other
  modified_base (21)..(21): a, c, g, t, unknown or other
ggngarggngarggngarggn

SEQ ID NO: 3679 - DNA, 21 bp, Artificial Sequence
  Description of Artificial Sequence: Synthetic oligonucleotide
  modified_base (3)..(3): a, c, g, t, unknown or other
  modified_base (9)..(9): a, c, g, t, unknown or other
  modified_base (15)..(15): a, c, g, t, unknown or other
  modified_base (18)..(18): a, c, g, t, unknown or other
ggngarggngarggnggngar

SEQ ID NO: 3680 - DNA, 21 bp, Artificial Sequence
  Description of Artificial Sequence: Synthetic oligonucleotide
  modified_base (3)..(3): a, c, g, t, unknown or other
  modified_base (9)..(9): a, c, g, t, unknown or other
  modified_base (12)..(12): a, c, g, t, unknown or other
  modified_base (18)..(18): a, c, g, t, unknown or other
ggngarggnggngarggngar

SEQ ID NO: 3681 - DNA, 21 bp, Artificial Sequence
  Description of Artificial Sequence: Synthetic oligonucleotide
  modified_base (3)..(3): a, c, g, t, unknown or other
  modified_base (6)..(6): a, c, g, t, unknown or other
  modified_base (18)..(18): a, c, g, t, unknown or other
  modified_base (21)..(21): a, c, g, t, unknown or other
ggnggngargargarggnggn

SEQ ID NO: 3682 - DNA, 21 bp, Artificial Sequence
  Description of Artificial Sequence: Synthetic oligonucleotide
  modified_base (3)..(3): a, c, g, t, unknown or other
  modified_base (6)..(6): a, c, g, t, unknown or other
  modified_base (15)..(15): a, c, g, t, unknown or other
  modified_base (21)..(21): a, c, g, t, unknown or other
ggnggngargarggngarggn

SEQ ID NO: 3683 - DNA, 21 bp, Artificial Sequence
  Description of Artificial Sequence: Synthetic oligonucleotide
  modified_base (3)..(3): a, c, g, t, unknown or other
  modified_base (6)..(6): a, c, g, t, unknown or other
  modified_base (15)..(15): a, c, g, t, unknown or other
  modified_base (18)..(18): a, c, g, t, unknown or other
ggnggngargarggnggngar

SEQ ID NO: 3684 - DNA, 21 bp, Artificial Sequence
  Description of Artificial Sequence: Synthetic oligonucleotide
  modified_base (3)..(3): a, c, g, t, unknown or other
  modified_base (6)..(6): a, c, g, t, unknown or other
  modified_base (12)..(12): a, c, g, t, unknown or other
  modified_base (21)..(21): a, c, g, t, unknown or other
ggnggngarggngargarggn

SEQ ID NO: 3685 - DNA, 21 bp, Artificial Sequence
  Description of Artificial Sequence: Synthetic oligonucleotide
  modified_base (3)..(3): a, c, g, t, unknown or other
  modified_base (6)..(6): a, c, g, t, unknown or other
  modified_base (12)..(12): a, c, g, t, unknown or other
  modified_base (18)..(18): a, c, g, t, unknown or other
ggnggngarggngarggngar

SEQ ID NO: 3686 - DNA, 21 bp, Artificial Sequence
  Description of Artificial Sequence: Synthetic oligonucleotide
  modified_base (3)..(3): a, c, g, t, unknown or other
  modified_base (6)..(6): a, c, g, t, unknown or other
  modified_base (12)..(12): a, c, g, t, unknown or other
  modified_base (15)..(15): a, c, g, t, unknown or other
ggnggngarggnggngargar

SEQ ID NO: 3687 - DNA, 21 bp, Artificial Sequence
  Description of Artificial Sequence: Synthetic oligonucleotide
  modified_base (3)..(3): a, c, g, t, unknown or other
  modified_base (6)..(6): a, c, g, t, unknown or other
  modified_base (9)..(9): a, c, g, t, unknown or other
  modified_base (21)..(21): a, c, g, t, unknown or other
ggnggnggngargargarggn

SEQ ID NO: 3688 - DNA, 21 bp, Artificial Sequence
  Description of Artificial Sequence: Synthetic oligonucleotide
  modified_base (3)..(3): a, c, g, t, unknown or other
  modified_base (6)..(6): a, c, g, t, unknown or other
  modified_base (9)..(9): a, c, g, t, unknown or other
  modified_base (18)..(18): a, c, g, t, unknown or other
ggnggnggngargarggngar

SEQ ID NO: 3689 - DNA, 21 bp, Artificial Sequence
  Description of Artificial Sequence: Synthetic oligonucleotide
  modified_base (3)..(3): a, c, g, t, unknown or other
  modified_base (6)..(6): a, c, g, t, unknown or other
  modified_base (9)..(9): a, c, g, t, unknown or other
  modified_base (15)..(15): a, c, g, t, unknown or other
ggnggnggngarggngargar

SEQ ID NO: 3690 - DNA, 21 bp, Artificial Sequence
  Description of Artificial Sequence: Synthetic oligonucleotide
  modified_base (3)..(3): a, c, g, t, unknown or other
  modified_base (6)..(6): a, c, g, t, unknown or other
  modified_base (9)..(9): a, c, g, t, unknown or other
  modified_base (12)..(12): a, c, g, t, unknown or other
  modified_base (15)..(15): a, c, g, t, unknown or other
ggnggnggnggnggngargar

SEQ ID NO: 3691 - DNA, 21 bp, Artificial Sequence
  Description of Artificial Sequence: Synthetic oligonucleotide
  modified_base (9)..(9): a, c, g, t, unknown or other
  modified_base (12)..(12): a, c, g, t, unknown or other
  modified_base (15)..(15): a, c, g, t, unknown or other
  modified_base (18)..(18): a, c, g, t, unknown or other
  modified_base (21)..(21): a, c, g, t, unknown or other
gargarggnggnggnggnggn

SEQ ID NO: 3692 - DNA, 21 bp, Artificial Sequence
  Description of Artificial Sequence: Synthetic oligonucleotide
  modified_base (6)..(6): a, c, g, t, unknown or other
  modified_base (12)..(12): a, c, g, t, unknown or other
  modified_base (15)..(15): a, c, g, t, unknown or other
  modified_base (18)..(18): a, c, g, t, unknown or other
  modified_base (21)..(21): a, c, g, t, unknown or other
garggngarggnggnggnggn

SEQ ID NO: 3693 - DNA, 21 bp, Artificial Sequence
  Description of Artificial Sequence: Synthetic oligonucleotide
  modified_base (6)..(6): a, c, g, t, unknown or other
  modified_base (9)..(9): a, c, g, t, unknown or other
  modified_base (15)..(15): a, c, g, t, unknown or other
  modified_base (18)..(18): a, c, g, t, unknown or other
  modified_base (21)..(21): a, c, g, t, unknown or other
garggnggngarggnggnggn

SEQ ID NO: 3694 - DNA, 21 bp, Artificial Sequence
  Description of Artificial Sequence: Synthetic oligonucleotide
  modified_base (6)..(6): a, c, g, t, unknown or other
  modified_base (9)..(9): a, c, g, t, unknown or other
  modified_base (12)..(12): a, c, g, t, unknown or other
  modified_base (18)..(18): a, c, g, t, unknown or other
  modified_base (21)..(21): a, c, g, t, unknown or other
garggnggnggngarggnggn

SEQ ID NO: 3695 - DNA, 21 bp, Artificial Sequence
  Description of Artificial Sequence: Synthetic oligonucleotide
  modified_base (6)..(6): a, c, g, t, unknown or other
  modified_base (9)..(9): a, c, g, t, unknown or other
  modified_base (12)..(12): a, c, g, t, unknown or other
  modified_base (15)..(15): a, c, g, t, unknown or other
  modified_base (21)..(21): a, c, g, t, unknown or other
garggnggnggnggngarggn

SEQ ID NO: 3696 - DNA, 21 bp, Artificial Sequence
  Description of Artificial Sequence: Synthetic oligonucleotide
  modified_base (6)..(6): a, c, g, t, unknown or other
  modified_base (9)..(9): a, c, g, t, unknown or other
  modified_base (12)..(12): a, c, g, t, unknown or other
  modified_base (15)..(15): a, c, g, t, unknown or other
  modified_base (18)..(18): a, c, g, t, unknown or other
garggnggnggnggnggngar

SEQ ID NO: 3697 - DNA, 21 bp, Artificial Sequence
  Description of Artificial Sequence: Synthetic oligonucleotide
  modified_base (3)..(3): a, c, g, t, unknown or other
  modified_base (12)..(12): a, c, g, t, unknown or other
  modified_base (15)..(15): a, c, g, t, unknown or other
  modified_base (18)..(18): a, c, g, t, unknown or other
  modified_base (21)..(21): a, c, g, t, unknown or other
ggngargarggnggnggnggn

SEQ ID NO: 3698 - DNA, 21 bp, Artificial Sequence
  Description of Artificial Sequence: Synthetic oligonucleotide
  modified_base (3)..(3): a, c, g, t, unknown or other
  modified_base (9)..(9): a, c, g, t, unknown or other
  modified_base (15)..(15): a, c, g, t, unknown or other
  modified_base (18)..(18): a, c, g, t, unknown or other
  modified_base (21)..(21): a, c, g, t, unknown or other
ggngarggngarggnggnggn

SEQ ID NO: 3699 - DNA, 21 bp, Artificial Sequence
  Description of Artificial Sequence: Synthetic oligonucleotide
  modified_base (3)..(3): a, c, g, t, unknown or other
  modified_base (9)..(9): a, c, g, t, unknown or other
  modified_base (12)..(12): a, c, g, t, unknown or other
  modified_base (18)..(18): a, c, g, t, unknown or other
  modified_base (21)..(21): a, c, g, t, unknown or other
ggngarggnggngarggnggn

SEQ ID NO: 3700 - DNA, 21 bp, Artificial Sequence
  Description of Artificial Sequence: Synthetic oligonucleotide
  modified_base (3)..(3): a, c, g, t, unknown or other
  modified_base (9)..(9): a, c, g, t, unknown or other
  modified_base (12)..(12): a, c, g, t, unknown or other
  modified_base (15)..(15): a, c, g, t, unknown or other
  modified_base (21)..(21): a, c, g, t, unknown or other
ggngarggnggnggngarggn

SEQ ID NO: 3701 - DNA, 21 bp, Artificial Sequence
  Description of Artificial Sequence: Synthetic oligonucleotide
  modified_base (3)..(3): a, c, g, t, unknown or other
  modified_base (9)..(9): a, c, g, t, unknown or other
  modified_base (12)..(12): a, c, g, t, unknown or other
  modified_base (15)..(15): a, c, g, t, unknown or other
  modified_base (18)..(18): a, c, g, t, unknown or other
ggngarggnggnggnggngar

SEQ ID NO: 3702 - DNA, 21 bp, Artificial Sequence
  Description of Artificial Sequence: Synthetic oligonucleotide
  modified_base (3)..(3): a, c, g, t, unknown or other
  modified_base (6)..(6): a, c, g, t, unknown or other
  modified_base (15)..(15): a, c, g, t, unknown or other
  modified_base (18)..(18): a, c, g, t, unknown or other
  modified_base (21)..(21): a, c, g, t, unknown or other
ggnggngargarggnggnggn

SEQ ID NO: 3703 - DNA, 21 bp, Artificial Sequence
  Description of Artificial Sequence: Synthetic oligonucleotide
  modified_base (3)..(3): a, c, g, t, unknown or other
  modified_base (6)..(6): a, c, g, t, unknown or other
  modified_base (12)..(12): a, c, g, t, unknown or other
  modified_base (18)..(18): a, c, g, t, unknown or other
  modified_base (21)..(21): a, c, g, t, unknown or other
ggnggngarggngarggnggn

SEQ ID NO: 3704 - DNA, 21 bp, Artificial Sequence
  Description of Artificial Sequence: Synthetic oligonucleotide
  modified_base (3)..(3): a, c, g, t, unknown or other
  modified_base (6)..(6): a, c, g, t, unknown or other
  modified_base (12)..(12): a, c, g, t, unknown or other
  modified_base (15)..(15): a, c, g, t, unknown or other
  modified_base (21)..(21): a, c, g, t, unknown or other
ggnggngarggnggngarggn

SEQ ID NO: 3705 - DNA, 21 bp, Artificial Sequence
  Description of Artificial Sequence: Synthetic oligonucleotide
  modified_base (3)..(3): a, c, g, t, unknown or other
  modified_base (6)..(6): a, c, g, t, unknown or other
  modified_base (12)..(12): a, c, g, t, unknown or other
  modified_base (15)..(15): a, c, g, t, unknown or other
  modified_base (18)..(18): a, c, g, t, unknown or other
ggnggngarggnggnggngar

SEQ ID NO: 3706 - DNA, 21 bp, Artificial Sequence
  Description of Artificial Sequence: Synthetic oligonucleotide
  modified_base (3)..(3): a, c, g, t, unknown or other
  modified_base (6)..(6): a, c, g, t, unknown or other
  modified_base (9)..(9): a, c, g, t, unknown or other
  modified_base (18)..(18): a, c, g, t, unknown or other
  modified_base (21)..(21): a, c, g, t, unknown or other
ggnggnggngargarggnggn

SEQ ID NO: 3707 - DNA, 21 bp, Artificial Sequence
  Description of Artificial Sequence: Synthetic oligonucleotide
  modified_base (3)..(3): a, c, g, t, unknown or other
  modified_base (6)..(6): a, c, g, t, unknown or other
  modified_base (9)..(9): a, c, g, t, unknown or other
  modified_base (15)..(15): a, c, g, t, unknown or other
  modified_base (21)..(21): a, c, g, t, unknown or other
ggnggnggngarggngarggn

SEQ ID NO: 3708 - DNA, 21 bp, Artificial Sequence
  Description of Artificial Sequence: Synthetic oligonucleotide
  modified_base (3)..(3): a, c, g, t, unknown or other
  modified_base (6)..(6): a, c, g, t, unknown or other
  modified_base (9)..(9): a, c, g, t, unknown or other
  modified_base (15)..(15): a, c, g, t, unknown or other
  modified_base (18)..(18): a, c, g, t, unknown or other
ggnggnggngarggnggngar

SEQ ID NO: 3709 - DNA, 21 bp, Artificial Sequence
  Description of Artificial Sequence: Synthetic oligonucleotide
  modified_base (3)..(3): a, c, g, t, unknown or other
  modified_base (6)..(6): a, c, g, t, unknown or other
  modified_base (9)..(9): a, c, g, t, unknown or other
  modified_base (12)..(12): a, c, g, t, unknown or other
  modified_base (21)..(21): a, c, g, t, unknown or other
ggnggnggnggngargarggn

SEQ ID NO: 3710 - DNA, 21 bp, Artificial Sequence
  Description of Artificial Sequence: Synthetic oligonucleotide
  modified_base (3)..(3): a, c, g, t, unknown or other
  modified_base (6)..(6): a, c, g, t, unknown or other
  modified_base (9)..(9): a, c, g, t, unknown or other
  modified_base (12)..(12): a, c, g, t, unknown or other
  modified_base (18)..(18): a, c, g, t, unknown or other
ggnggnggnggngarggngar

SEQ ID NO: 3711 - DNA, 21 bp, Artificial Sequence
  Description of Artificial Sequence: Synthetic oligonucleotide
  modified_base (3)..(3): a, c, g, t, unknown or other
  modified_base (6)..(6): a, c, g, t, unknown or other
  modified_base (9)..(9): a, c, g, t, unknown or other
  modified_base (12)..(12): a, c, g, t, unknown or other
  modified_base (15)..(15): a, c, g, t, unknown or other
  modified_base (18)..(18): a, c, g, t, unknown or other
ggnggnggnggnggnggngar

SEQ ID NO: 3712 - DNA, 21 bp, Artificial Sequence
  Description of Artificial Sequence: Synthetic oligonucleotide
  modified_base (6)..(6): a, c, g, t, unknown or other
  modified_base (9)..(9): a, c, g, t, unknown or other
  modified_base (12)..(12): a, c, g, t, unknown or other
  modified_base (15)..(15): a, c, g, t, unknown or other
  modified_base (18)..(18): a, c, g, t, unknown or other
  modified_base (21)..(21): a, c, g, t, unknown or other
garggnggnggnggnggnggn

SEQ ID NO: 3713 - DNA, 21 bp, Artificial Sequence
  Description of Artificial Sequence: Synthetic oligonucleotide
  modified_base (3)..(3): a, c, g, t, unknown or other
  modified_base (9)..(9): a, c, g, t, unknown or other
  modified_base (12)..(12): a, c, g, t, unknown or other
  modified_base (15)..(15): a, c, g, t, unknown or other
  modified_base (18)..(18): a, c, g, t, unknown or other
  modified_base (21)..(21): a, c, g, t, unknown or other
ggngarggnggnggnggnggn

SEQ ID NO: 3714 - DNA, 21 bp, Artificial Sequence
  Description of Artificial Sequence: Synthetic oligonucleotide
  modified_base (3)..(3): a, c, g, t, unknown or other
  modified_base (6)..(6): a, c, g, t, unknown or other
  modified_base (12)..(12): a, c, g, t, unknown or other
  modified_base (15)..(15): a, c, g, t, unknown or other
  modified_base (18)..(18): a, c, g, t, unknown or other
  modified_base (21)..(21): a, c, g, t, unknown or other
ggnggngarggnggnggnggn

SEQ ID NO: 3715 - DNA, 21 bp, Artificial Sequence
  Description of Artificial Sequence: Synthetic oligonucleotide
  modified_base (3)..(3): a, c, g, t, unknown or other
  modified_base (6)..(6): a, c, g, t, unknown or other
  modified_base (9)..(9): a, c, g, t, unknown or other
  modified_base (15)..(15): a, c, g, t, unknown or other
  modified_base (18)..(18): a, c, g, t, unknown or other
  modified_base (21)..(21): a, c, g, t, unknown or other
ggnggnggngarggnggnggn

SEQ ID NO: 3716 - DNA, 21 bp, Artificial Sequence
  Description of Artificial Sequence: Synthetic oligonucleotide
  modified_base (3)..(3): a, c, g, t, unknown or other
  modified_base (6)..(6): a, c, g, t, unknown or other
  modified_base (9)..(9): a, c, g, t, unknown or other
  modified_base (12)..(12): a, c, g, t, unknown or other
  modified_base (18)..(18): a, c, g, t, unknown or other
  modified_base (21)..(21): a, c, g, t, unknown or other
ggnggnggnggngarggnggn

SEQ ID NO: 3717 - DNA, 21 bp, Artificial Sequence
  Description of Artificial Sequence: Synthetic oligonucleotide
  modified_base (3)..(3): a, c, g, t, unknown or other
  modified_base (6)..(6): a, c, g, t, unknown or other
  modified_base (9)..(9): a, c, g, t, unknown or other
  modified_base (12)..(12): a, c, g, t, unknown or other
  modified_base (15)..(15): a, c, g, t, unknown or other
  modified_base (21)..(21): a, c, g, t, unknown or other
ggnggnggnggnggngarggn

SEQ ID NO: 3718 - DNA, 12 bp, Artificial Sequence
  Description of Artificial Sequence: Synthetic oligonucleotide
  modified_base (3)..(3): a, c, g, t, unknown or other
  modified_base (6)..(6): a, c, g, t, unknown or other
  modified_base (9)..(9): a, c, g, t, unknown or other
ggnggnggncay

SEQ ID NO: 3719 - DNA, 12 bp, Artificial Sequence
  Description of Artificial Sequence: Synthetic oligonucleotide
  modified_base (6)..(6): a, c, g, t, unknown or other
  modified_base (9)..(9): a, c, g, t, unknown or other
  modified_base (12)..(12): a, c, g, t, unknown or other
cayggnggnggn

SEQ ID NO: 3720 - DNA, 12 bp, Artificial Sequence
  Description of Artificial Sequence: Synthetic oligonucleotide
  modified_base (3)..(3): a, c, g, t, unknown or other
  modified_base (9)..(9): a, c, g, t, unknown or other
  modified_base (12)..(12): a, c, g, t, unknown or other
ggncayggnggn

SEQ ID NO: 3721 - DNA, 12 bp, Artificial Sequence
  Description of Artificial Sequence: Synthetic oligonucleotide
  modified_base (3)..(3): a, c, g, t, unknown or other
  modified_base (6)..(6): a, c, g, t, unknown or other
  modified_base (12)..(12): a, c, g, t, unknown or other
ggnggncayggn

SEQ ID NO: 3722 - DNA, 15 bp, Artificial Sequence
  Description of Artificial Sequence: Synthetic oligonucleotide
  modified_base (3)..(3): a, c, g, t, unknown or other
  modified_base (6)..(6): a, c, g, t, unknown or other
  modified_base (9)..(9): a, c, g, t, unknown or other
  modified_base (12)..(12): a, c, g, t, unknown or other
ggnggnggnggncay

SEQ ID NO: 3723 - DNA, 15 bp, Artificial Sequence
  Description of Artificial Sequence: Synthetic oligonucleotide
  modified_base (6)..(6): a, c, g, t, unknown or other
  modified_base (9)..(9): a, c, g, t, unknown or other
  modified_base (12)..(12): a, c, g, t, unknown or other
  modified_base (15)..(15): a, c, g, t, unknown or other
cayggnggnggnggn

SEQ ID NO: 3724 - DNA, 15 bp, Artificial Sequence
  Description of Artificial Sequence: Synthetic oligonucleotide
  modified_base (3)..(3): a, c, g, t, unknown or other
  modified_base (9)..(9): a, c, g, t, unknown or other
  modified_base (12)..(12): a, c, g, t, unknown or other
  modified_base (15)..(15): a, c, g, t, unknown or other
ggncayggnggnggn

SEQ ID NO: 3725 - DNA, 15 bp, Artificial Sequence
  Description of Artificial Sequence: Synthetic oligonucleotide
  modified_base (3)..(3): a, c, g, t, unknown or other
  modified_base (6)..(6): a, c, g, t, unknown or other
  modified_base (12)..(12): a, c, g, t, unknown or other
  modified_base (15)..(15): a, c, g, t, unknown or other
ggnggncayggnggn

SEQ ID NO: 3726 - DNA, 15 bp, Artificial Sequence
  Description of Artificial Sequence: Synthetic oligonucleotide
  modified_base (3)..(3): a, c, g, t, unknown or other
  modified_base (6)..(6): a, c, g, t, unknown or other
  modified_base (9)..(9): a, c, g, t, unknown or other
  modified_base (15)..(15): a, c, g, t, unknown or other
ggnggnggncayggn

SEQ ID NO: 3727 - DNA, 15 bp, Artificial Sequence
  Description of Artificial Sequence: Synthetic oligonucleotide
  modified_base (3)..(3): a, c, g, t, unknown or other
  modified_base (6)..(6): a, c, g, t, unknown or other
  modified_base (9)..(9): a, c, g, t, unknown or other
ggnggnggncaycay

SEQ ID NO: 3728 - DNA, 15 bp, Artificial Sequence
  Description of Artificial Sequence: Synthetic oligonucleotide
  modified_base (9)..(9): a, c, g, t, unknown or other
  modified_base (12)..(12): a, c, g, t, unknown or other
  modified_base (15)..(15): a, c, g, t, unknown or other
caycayggnggnggn

SEQ ID NO: 3729 - DNA, 15 bp, Artificial Sequence
  Description of Artificial Sequence: Synthetic oligonucleotide
  modified_base (6)..(6): a, c, g, t, unknown or other
  modified_base (12)..(12): a, c, g, t, unknown or other
  modified_base (15)..(15): a, c, g, t, unknown or other
cayggncayggnggn

SEQ ID NO: 3730 - DNA, 15 bp, Artificial Sequence
  Description of Artificial Sequence: Synthetic oligonucleotide
  modified_base (6)..(6): a, c, g, t, unknown or other
  modified_base (9)..(9): a, c, g, t, unknown or other
  modified_base (15)..(15): a, c, g, t, unknown or other
cayggnggncayggn

SEQ ID NO: 3731 - DNA, 15 bp, Artificial Sequence
  Description of Artificial Sequence: Synthetic oligonucleotide
  modified_base (6)..(6): a, c, g, t, unknown or other
  modified_base (9)..(9): a, c, g, t, unknown or other
  modified_base (12)..(12): a, c, g, t, unknown or other
cayggnggnggncay

SEQ ID NO: 3732 - DNA, 15 bp, Artificial Sequence
  Description of Artificial Sequence: Synthetic oligonucleotide
  modified_base (3)..(3): a, c, g, t, unknown or other
  modified_base (12)..(12): a, c, g, t, unknown or other
  modified_base (15)..(15): a, c, g, t, unknown or other
ggncaycayggnggn

SEQ ID NO: 3733 - DNA, 15 bp, Artificial Sequence
  Description of Artificial Sequence: Synthetic oligonucleotide
  modified_base (3)..(3): a, c, g, t, unknown or other
  modified_base (9)..(9): a, c, g, t, unknown or other
  modified_base (15)..(15): a, c, g, t, unknown or other
ggncayggncayggn

SEQ ID NO: 3734 - DNA, 15 bp, Artificial Sequence
  Description of Artificial Sequence: Synthetic oligonucleotide
  modified_base (3)..(3): a, c, g, t, unknown or other
  modified_base (9)..(9): a, c, g, t, unknown or other
  modified_base (12)..(12): a, c, g, t, unknown or other
ggncayggnggncay

SEQ ID NO: 3735 - DNA, 15 bp, Artificial Sequence
  Description of Artificial Sequence: Synthetic oligonucleotide
  modified_base (3)..(3): a, c, g, t, unknown or other
  modified_base (6)..(6): a, c, g, t, unknown or other
  modified_base (15)..(15): a, c, g, t, unknown or other
ggnggncaycayggn

SEQ ID NO: 3736 - DNA, 15 bp, Artificial Sequence
  Description of Artificial Sequence: Synthetic oligonucleotide
  modified_base (3)..(3): a, c, g, t, unknown or other
  modified_base (6)..(6): a, c, g, t, unknown or other
  modified_base (12)..(12): a, c, g, t, unknown or other
ggnggncayggncay

SEQ ID NO: 3737 - DNA, 18 bp, Artificial Sequence
  Description of Artificial Sequence: Synthetic oligonucleotide
  modified_base (3)..(3): a, c, g, t, unknown or other
  modified_base (6)..(6): a, c, g, t, unknown or other
  modified_base (9)..(9): a, c, g, t, unknown or other
  modified_base (12)..(12): a, c, g, t, unknown or other
  modified_base (15)..(15): a, c, g, t, unknown or other
ggnggnggnggnggncay

SEQ ID NO: 3738 - DNA, 18 bp, Artificial Sequence
  Description of Artificial Sequence: Synthetic oligonucleotide
  modified_base (6)..(6): a, c, g, t, unknown or other
  modified_base (9)..(9): a, c, g, t, unknown or other
  modified_base (12)..(12): a, c, g, t, unknown or other
  modified_base (15)..(15): a, c, g, t, unknown or other
  modified_base (18)..(18): a, c, g, t, unknown or other
cayggnggnggnggnggn

SEQ ID NO: 3739 - DNA, 18 bp, Artificial Sequence
  Description of Artificial Sequence: Synthetic oligonucleotide
  modified_base (3)..(3): a, c, g, t, unknown or other
  modified_base (9)..(9): a, c, g, t, unknown or other
  modified_base (12)..(12): a, c, g, t, unknown or other
  modified_base (15)..(15): a, c, g, t, unknown or other
  modified_base (18)..(18): a, c, g, t, unknown or other
ggncayggnggnggnggn

SEQ ID NO: 3740 - DNA, 18 bp, Artificial Sequence
  Description of Artificial Sequence: Synthetic oligonucleotide
  modified_base (3)..(3): a, c, g, t, unknown or other
  modified_base (6)..(6): a, c, g, t, unknown or other
  modified_base (12)..(12): a, c, g, t, unknown or other
  modified_base (15)..(15): a, c, g, t, unknown or other
  modified_base (18)..(18): a, c, g, t, unknown or other
ggnggncayggnggnggn

SEQ ID NO: 3741 - DNA, 18 bp, Artificial Sequence
  Description of Artificial Sequence: Synthetic oligonucleotide
  modified_base (3)..(3): a, c, g, t, unknown or other
  modified_base (6)..(6): a, c, g, t, unknown or other
  modified_base (9)..(9): a, c, g, t, unknown or other
  modified_base (15)..(15): a, c, g, t, unknown or other
  modified_base (18)..(18): a, c, g, t, unknown or other
ggnggnggncayggnggn

SEQ ID NO: 3742 - DNA, 18 bp, Artificial Sequence
  Description of Artificial Sequence: Synthetic oligonucleotide
  modified_base (3)..(3): a, c, g, t, unknown or other
  modified_base (6)..(6): a, c, g, t, unknown or other
  modified_base (9)..(9): a, c, g, t, unknown or other
  modified_base (12)..(12): a, c, g, t, unknown or other
  modified_base (18)..(18): a, c, g, t, unknown or other
ggnggnggnggncayggn

SEQ ID NO: 3743 - DNA, 18 bp, Artificial Sequence
  Description of Artificial Sequence: Synthetic oligonucleotide
  modified_base (3)..(3): a, c, g, t, unknown or other
  modified_base (6)..(6): a, c, g, t, unknown or other
  modified_base (9)..(9): a, c, g, t, unknown or other
  modified_base (12)..(12): a, c, g, t, unknown or other
ggnggnggnggncaycay

SEQ ID NO: 3744 - DNA, 18 bp, Artificial Sequence
  Description of Artificial Sequence: Synthetic oligonucleotide
  modified_base (9)..(9): a, c, g, t, unknown or other
  modified_base (12)..(12): a, c, g, t, unknown or other
  modified_base (15)..(15): a, c, g, t, unknown or other
  modified_base (18)..(18): a, c, g, t, unknown or other
caycayggnggnggnggn

SEQ ID NO: 3745 - DNA, 18 bp, Artificial Sequence
  Description of Artificial Sequence: Synthetic oligonucleotide
  modified_base (6)..(6): a, c, g, t, unknown or other
  modified_base (12)..(12): a, c, g, t, unknown or other
  modified_base (15)..(15): a, c, g, t, unknown or other
  modified_base (18)..(18): a, c, g, t, unknown or other
cayggncayggnggnggn

SEQ ID NO: 3746 - DNA, 18 bp, Artificial Sequence
  Description of Artificial Sequence: Synthetic oligonucleotide
  modified_base (6)..(6): a, c, g, t, unknown or other
  modified_base (9)..(9): a, c, g, t, unknown or other
  modified_base (15)..(15): a, c, g, t, unknown or other
  modified_base (18)..(18): a, c, g, t, unknown or other
cayggnggncayggnggn

SEQ ID NO: 3747 - DNA, 18 bp, Artificial Sequence
  Description of Artificial Sequence: Synthetic oligonucleotide
  modified_base (6)..(6): a, c, g, t, unknown or other
  modified_base (9)..(9): a, c, g, t, unknown or other
  modified_base (12)..(12): a, c, g, t, unknown or other
  modified_base (18)..(18): a, c, g, t, unknown or other
cayggnggnggncayggn

SEQ ID NO: 3748 - DNA, 18 bp, Artificial Sequence
  Description of Artificial Sequence: Synthetic oligonucleotide
  modified_base (6)..(6): a, c, g, t, unknown or other
  modified_base (9)..(9): a, c, g, t, unknown or other
  modified_base (12)..(12): a, c, g, t, unknown or other
  modified_base (15)..(15): a, c, g, t, unknown or other
cayggnggnggnggncay

SEQ ID NO: 3749 - DNA, 18 bp, Artificial Sequence
  Description of Artificial Sequence: Synthetic oligonucleotide
  modified_base (3)..(3): a, c, g, t, unknown or other
  modified_base (12)..(12): a, c, g, t, unknown or other
  modified_base (15)..(15): a, c, g, t, unknown or other
  modified_base (18)..(18): a, c, g, t, unknown or other
ggncaycayggnggnggn

SEQ ID NO: 3750 - DNA, 18 bp, Artificial Sequence
  Description of Artificial Sequence: Synthetic oligonucleotide
  modified_base (3)..(3): a, c, g, t, unknown or other
  modified_base (9)..(9): a, c, g, t, unknown or other
  modified_base (15)..(15): a, c, g, t, unknown or other
  modified_base (18)..(18): a, c, g, t, unknown or other
ggncayggncayggnggn

SEQ ID NO: 3751 - DNA, 18 bp, Artificial Sequence
  Description of Artificial Sequence: Synthetic oligonucleotide
  modified_base (3)..(3): a, c, g, t, unknown or other
  modified_base (9)..(9): a, c, g, t, unknown or other
  modified_base (12)..(12): a, c, g, t, unknown or other
  modified_base (18)..(18): a, c, g, t, unknown or other
ggncayggnggncayggn

SEQ ID NO: 3752 - DNA, 18 bp, Artificial Sequence
  Description of Artificial Sequence: Synthetic oligonucleotide
  modified_base (3)..(3): a, c, g, t, unknown or other
  modified_base (9)..(9): a, c, g, t, unknown or other
  modified_base (12)..(12): a, c, g, t, unknown or other
  modified_base (15)..(15): a, c, g, t, unknown or other
ggncayggnggnggncay

SEQ ID NO: 3753 - DNA, 18 bp, Artificial Sequence
  Description of Artificial Sequence: Synthetic oligonucleotide
  modified_base (3)..(3): a, c, g, t, unknown or other
  modified_base (6)..(6): a, c, g, t, unknown or other
  modified_base (15)..(15): a, c, g, t, unknown or other
  modified_base (18)..(18): a, c, g, t, unknown or other
ggnggncaycayggnggn

SEQ ID NO: 3754 - DNA, 18 bp, Artificial Sequence
  Description of Artificial Sequence: Synthetic oligonucleotide
  modified_base (3)..(3): a, c, g, t, unknown or other
  modified_base (6)..(6): a, c, g, t, unknown or other
  modified_base (12)..(12): a, c, g, t, unknown or other
  modified_base (18)..(18): a, c, g, t, unknown or other
ggnggncayggncayggn

SEQ ID NO: 3755 - DNA, 18 bp, Artificial Sequence
  Description of Artificial Sequence: Synthetic oligonucleotide
  modified_base (3)..(3): a, c, g, t, unknown or other
  modified_base (6)..(6): a, c, g, t, unknown or other
  modified_base (12)..(12): a, c, g, t, unknown or other
  modified_base (15)..(15): a, c, g, t, unknown or other
ggnggncayggnggncay

SEQ ID NO: 3756 - DNA, 18 bp, Artificial Sequence
  Description of Artificial Sequence: Synthetic oligonucleotide
  modified_base (3)..(3): a, c, g, t, unknown or other
  modified_base (6)..(6): a, c, g, t, unknown or other
  modified_base (9)..(9): a, c, g, t, unknown or other
  modified_base (18)..(18): a, c, g, t, unknown or other
ggnggnggncaycayggn

SEQ ID NO: 3757 - DNA, 18 bp, Artificial Sequence
  Description of Artificial Sequence: Synthetic oligonucleotide
  modified_base (3)..(3): a, c, g, t, unknown or other
  modified_base (6)..(6): a, c, g, t, unknown or other
  modified_base (9)..(9): a, c, g, t, unknown or other
  modified_base (15)..(15): a, c, g, t, unknown or other
ggnggnggncayggncay

SEQ ID NO: 3758 - DNA, 21 bp, Artificial Sequence
  Description of Artificial Sequence: Synthetic oligonucleotide
  modified_base (3)..(3): a, c, g, t, unknown or other
  modified_base (6)..(6): a, c, g, t, unknown or other
  modified_base (9)..(9): a, c, g, t, unknown or other
  modified_base (12)..(12): a, c, g, t, unknown or other
ggnggnggnggncaycaycay

SEQ ID NO: 3759 - DNA, 21 bp, Artificial Sequence
  Description of Artificial Sequence: Synthetic oligonucleotide
  modified_base (12)..(12): a, c, g, t, unknown or other
  modified_base (15)..(15): a, c, g, t, unknown or other
  modified_base (18)..(18): a, c, g, t, unknown or other
  modified_base (21)..(21): a, c, g, t, unknown or other
caycaycayggnggnggnggn

SEQ ID NO: 3760 - DNA, 21 bp, Artificial Sequence
  Description of Artificial Sequence: Synthetic oligonucleotide
  modified_base (6)..(6): a, c, g, t, unknown or other
  modified_base (15)..(15): a, c, g, t, unknown or other
  modified_base (18)..(18): a, c, g, t, unknown or other
  modified_base (21)..(21): a, c, g, t, unknown or other
cayggncaycayggnggnggn

SEQ ID NO: 3761 - DNA, 21 bp, Artificial Sequence
  Description of Artificial Sequence: Synthetic oligonucleotide
  modified_base (6)..(6): a, c, g, t, unknown or other
  modified_base (12)..(12): a, c, g, t, unknown or other
  modified_base (18)..(18): a, c, g, t, unknown or other
  modified_base (21)..(21): a, c, g, t, unknown or other
cayggncayggncayggnggn

SEQ ID NO: 3762 - DNA, 21 bp, Artificial Sequence
  Description of Artificial Sequence: Synthetic oligonucleotide
  modified_base (6)..(6): a, c, g, t, unknown or other
  modified_base (12)..(12): a, c, g, t, unknown or other
  modified_base (15)..(15): a, c, g, t, unknown or other
  modified_base (21)..(21): a, c, g, t, unknown or other
cayggncayggnggncayggn

SEQ ID NO: 3763 - DNA, 21 bp, Artificial Sequence
  Description of Artificial Sequence: Synthetic oligonucleotide
  modified_base (6)..(6): a, c, g, t, unknown or other
  modified_base (12)..(12): a, c, g, t, unknown or other
  modified_base (15)..(15): a, c, g, t, unknown or other
  modified_base (18)..(18): a, c, g, t, unknown or other
cayggncayggnggnggncay

SEQ ID NO: 3764 - DNA, 21 bp, Artificial Sequence
  Description of Artificial Sequence: Synthetic oligonucleotide
  modified_base (6)..(6): a, c, g, t, unknown or other
  modified_base (9)..(9): a, c, g, t, unknown or other
  modified_base (18)..(18): a, c, g, t, unknown or other
  modified_base (21)..(21): a, c, g, t, unknown or other
cayggnggncaycayggnggn

SEQ ID NO: 3765 - DNA, 21 bp, Artificial Sequence
  Description of Artificial Sequence: Synthetic oligonucleotide
  modified_base (6)..(6): a, c, g, t, unknown or other
  modified_base (9)..(9): a, c, g, t, unknown or other
  modified_base (15)..(15): a, c, g, t, unknown or other
  modified_base (21)..(21): a, c, g, t, unknown or other
cayggnggncayggncayggn

SEQ ID NO: 3766 - DNA, 21 bp, Artificial Sequence
  Description of Artificial Sequence: Synthetic oligonucleotide
  modified_base (6)..(6): a, c, g, t, unknown or other
  modified_base (9)..(9): a, c, g, t, unknown or other
  modified_base (15)..(15): a, c, g, t, unknown or other
  modified_base (18)..(18): a, c, g, t, unknown or other
cayggnggncayggnggncay

SEQ ID NO: 3767 - DNA, 21 bp, Artificial Sequence
  Description of Artificial Sequence: Synthetic oligonucleotide
  modified_base (6)..(6): a, c, g, t, unknown or other
  modified_base (9)..(9): a, c, g, t, unknown or other
  modified_base (12)..(12): a, c, g, t, unknown or other
  modified_base (18)..(18): a, c, g, t, unknown or other
cayggnggnggncayggncay

SEQ ID NO: 3768 - DNA, 21 bp, Artificial Sequence
  Description of Artificial Sequence: Synthetic oligonucleotide
  modified_base (6)..(6): a, c, g, t, unknown or other
  modified_base (9)..(9): a, c, g, t, unknown or other
  modified_base (12)..(12): a, c, g, t, unknown or other
  modified_base (21)..(21): a, c, g, t, unknown or other
cayggnggnggncaycayggn

SEQ ID NO: 3769 - DNA, 21 bp, Artificial Sequence
  Description of Artificial Sequence: Synthetic oligonucleotide
  modified_base (6)..(6): a, c, g, t, unknown or other
  modified_base (9)..(9): a, c, g, t, unknown or other
  modified_base (12)..(12): a, c, g, t, unknown or other
  modified_base (15)..(15): a, c, g, t, unknown or other
cayggnggnggnggncaycay

SEQ ID NO: 3770 - DNA, 21 bp, Artificial Sequence
  Description of Artificial Sequence: Synthetic oligonucleotide
  modified_base (9)..(9): a, c, g, t, unknown or other
  modified_base (15)..(15): a, c, g, t, unknown or other
  modified_base (18)..(18): a, c, g, t, unknown or other
  modified_base (21)..(21): a, c, g, t, unknown or other
caycayggncayggnggnggn

SEQ ID NO: 3771 - DNA, 21 bp, Artificial Sequence
  Description of Artificial Sequence: Synthetic oligonucleotide
  modified_base (9)..(9): a, c, g, t, unknown or other
  modified_base (12)..(12): a, c, g, t, unknown or other
  modified_base (18)..(18): a, c, g, t, unknown or other
  modified_base (21)..(21): a, c, g, t, unknown or other
caycayggnggncayggnggn

SEQ ID NO: 3772 - DNA, 21 bp, Artificial Sequence
  Description of Artificial Sequence: Synthetic oligonucleotide
  modified_base (9)..(9): a, c, g, t, unknown or other
  modified_base (12)..(12): a, c, g, t, unknown or other
  modified_base (15)..(15): a, c, g, t, unknown or other
  modified_base (21)..(21): a, c, g, t, unknown or other
caycayggnggnggncayggn

SEQ ID NO: 3773 - DNA, 21 bp, Artificial Sequence
  Description of Artificial Sequence: Synthetic oligonucleotide
  modified_base (9)..(9): a, c, g, t, unknown or other
  modified_base (12)..(12): a, c, g, t, unknown or other
  modified_base (15)..(15): a, c, g, t, unknown or other
  modified_base (18)..(18): a, c, g, t, unknown or other
caycayggnggnggnggncay

SEQ ID NO: 3774 - DNA, 21 bp, Artificial Sequence
  Description of Artificial Sequence: Synthetic oligonucleotide
  modified_base (3)..(3): a, c, g, t, unknown or other
  modified_base (15)..(15): a, c, g, t, unknown or other
  modified_base (18)..(18): a, c, g, t, unknown or other
  modified_base (21)..(21): a, c, g, t, unknown or other
ggncaycaycayggnggnggn

SEQ ID NO: 3775 - DNA, 21 bp, Artificial Sequence
  Description of Artificial Sequence: Synthetic oligonucleotide
  modified_base (3)..(3): a, c, g, t, unknown or other
  modified_base (12)..(12): a, c, g, t, unknown or other
  modified_base (18)..(18): a, c, g, t, unknown or other
  modified_base (21)..(21): a, c, g, t, unknown or other
ggncaycayggncayggnggn

SEQ ID NO: 3776 - DNA, 21 bp, Artificial Sequence
  Description of Artificial Sequence: Synthetic oligonucleotide
  modified_base (3)..(3): a, c, g, t, unknown or other
  modified_base (12)..(12): a, c, g, t, unknown or other
  modified_base (15)..(15): a, c, g, t, unknown or other
  modified_base (21)..(21): a, c, g, t, unknown or other
ggncaycayggnggncayggn

SEQ ID NO: 3777 - DNA, 21 bp, Artificial Sequence
  Description of Artificial Sequence: Synthetic oligonucleotide
  modified_base (3)..(3): a, c, g, t, unknown or other
  modified_base (12)..(12): a, c, g, t, unknown or other
  modified_base (15)..(15): a, c, g, t, unknown or other
  modified_base (18)..(18): a, c, g, t, unknown or other
ggncaycayggnggnggncay

SEQ ID NO: 3778 - DNA, 21 bp, Artificial Sequence
  Description of Artificial Sequence: Synthetic oligonucleotide
  modified_base (3)..(3): a, c, g, t, unknown or other
  modified_base (9)..(9): a, c, g, t, unknown or other
  modified_base (18)..(18): a, c, g, t, unknown or other
  modified_base (21)..(21): a, c, g, t, unknown or other
ggncayggncaycayggnggn

SEQ ID NO: 3779 - DNA, 21 bp, Artificial Sequence
  Description of Artificial Sequence: Synthetic oligonucleotide
  modified_base (3)..(3): a, c, g, t, unknown or other
  modified_base (9)..(9): a, c, g, t, unknown or other
  modified_base (12)..(12): a, c, g, t, unknown or other
  modified_base (21)..(21): a, c, g, t, unknown or other
ggncayggnggncaycayggn

SEQ ID NO: 3780 - DNA, 21 bp, Artificial Sequence
  Description of Artificial Sequence: Synthetic oligonucleotide
  modified_base (3)..(3): a, c, g, t, unknown or other
  modified_base (9)..(9): a, c, g, t, unknown or other
  modified_base (12)..(12): a, c, g, t, unknown or other
  modified_base (15)..(15): a, c, g, t, unknown or other
ggncayggnggnggncaycay

SEQ ID NO: 3781 - DNA, 21 bp, Artificial Sequence
  Description of Artificial Sequence: Synthetic oligonucleotide
  modified_base (3)..(3): a, c, g, t, unknown or other
  modified_base (9)..(9): a, c, g, t, unknown or other
  modified_base (15)..(15): a, c, g, t, unknown or other
  modified_base (21)..(21): a, c, g, t, unknown or other
ggncayggncayggncayggn

SEQ ID NO: 3782 - DNA, 21 bp, Artificial Sequence
  Description of Artificial Sequence: Synthetic oligonucleotide
  modified_base (3)..(3): a, c, g, t, unknown or other
  modified_base (9)..(9): a, c, g, t, unknown or other
  modified_base (15)..(15): a, c, g, t, unknown or other
  modified_base (18)..(18): a, c, g, t, unknown or other
ggncayggncayggnggncay

SEQ ID NO: 3783 - DNA, 21 bp, Artificial Sequence
  Description of Artificial Sequence: Synthetic oligonucleotide
  modified_base (3)..(3): a, c, g, t, unknown or other
  modified_base (9)..(9): a, c, g, t, unknown or other
  modified_base (12)..(12): a, c, g, t, unknown or other
  modified_base (18)..(18): a, c, g, t, unknown or other
ggncayggnggncayggncay

SEQ ID NO: 3784 - DNA, 21 bp, Artificial Sequence
  Description of Artificial Sequence: Synthetic oligonucleotide
  modified_base (3)..(3): a, c, g, t, unknown or other
  modified_base (6)..(6): a, c, g, t, unknown or other
  modified_base (18)..(18): a, c, g, t, unknown or other
  modified_base (21)..(21): a, c, g, t, unknown or other
ggnggncaycaycayggnggn

SEQ ID NO: 3785 - DNA, 21 bp, Artificial Sequence
  Description of Artificial Sequence: Synthetic oligonucleotide
  modified_base (3)..(3): a, c, g, t, unknown or other
  modified_base (6)..(6): a, c, g, t, unknown or other
  modified_base (15)..(15): a, c, g, t, unknown or other
  modified_base (21)..(21): a, c, g, t, unknown or other
ggnggncaycayggncayggn

SEQ ID NO: 3786 - DNA, 21 bp, Artificial Sequence
  Description of Artificial Sequence: Synthetic oligonucleotide
  modified_base (3)..(3): a, c, g, t, unknown or other
  modified_base (6)..(6): a, c, g, t, unknown or other
  modified_base (15)..(15): a, c, g, t, unknown or other
  modified_base (18)..(18): a, c, g, t, unknown or other
ggnggncaycayggnggncay

SEQ ID NO: 3787 - DNA, 21 bp, Artificial Sequence
  Description of Artificial Sequence: Synthetic oligonucleotide
  modified_base (3)..(3): a, c, g, t, unknown or other
  modified_base (6)..(6): a, c, g, t, unknown or other
  modified_base (12)..(12): a, c, g, t, unknown or other
  modified_base (21)..(21): a, c, g, t, unknown or other
ggnggncayggncaycayggn

SEQ ID NO: 3788 - DNA, 21 bp, Artificial Sequence
  Description of Artificial Sequence: Synthetic oligonucleotide
  modified_base (3)..(3): a, c, g, t, unknown or other
  modified_base (6)..(6): a, c, g, t, unknown or other
  modified_base (12)..(12): a, c, g, t, unknown or other
  modified_base (18)..(18): a, c, g, t, unknown or other
ggnggncayggncayggncay

SEQ ID NO: 3789 - DNA, 21 bp, Artificial Sequence
  Description of Artificial Sequence: Synthetic oligonucleotide
  modified_base (3)..(3): a, c, g, t, unknown or other
  modified_base (6)..(6): a, c, g, t, unknown or other
  modified_base (12)..(12): a, c, g, t, unknown or other
  modified_base (15)..(15): a, c, g, t, unknown or other
ggnggncayggnggncaycay

SEQ ID NO: 3790 - DNA, 21 bp, Artificial Sequence
  Description of Artificial Sequence: Synthetic oligonucleotide
  modified_base (3)..(3): a, c, g, t, unknown or other
  modified_base (6)..(6): a, c, g, t, unknown or other
  modified_base (9)..(9): a, c, g, t, unknown or other
  modified_base (21)..(21): a, c, g, t, unknown or other
ggnggnggncaycaycayggn

SEQ ID NO: 3791 - DNA, 21 bp, Artificial Sequence
  Description of Artificial Sequence: Synthetic oligonucleotide
  modified_base (3)..(3): a, c, g, t, unknown or other
  modified_base (6)..(6): a, c, g, t, unknown or other
  modified_base (9)..(9): a, c, g, t, unknown or other
  modified_base (18)..(18): a, c, g, t, unknown or other
ggnggnggncaycayggncay

SEQ ID NO: 3792 - DNA, 21 bp, Artificial Sequence
  Description of Artificial Sequence: Synthetic oligonucleotide
  modified_base (3)..(3): a, c, g, t, unknown or other
  modified_base (6)..(6): a, c, g, t, unknown or other
  modified_base (9)..(9): a, c, g, t, unknown or other
  modified_base (15)..(15): a, c, g, t, unknown or other
ggnggnggncayggncaycay

SEQ ID NO: 3793 - DNA, 21 bp, Artificial Sequence
  Description of Artificial Sequence: Synthetic oligonucleotide
  modified_base (3)..(3): a, c, g, t, unknown or other
  modified_base (6)..(6): a, c, g, t, unknown or other
  modified_base (9)..(9): a, c, g, t, unknown or other
  modified_base (12)..(12): a, c, g, t, unknown or other
  modified_base (15)..(15): a, c, g, t, unknown or other
ggnggnggnggnggncaycay

SEQ ID NO: 3794 - DNA, 21 bp, Artificial Sequence
  Description of Artificial Sequence: Synthetic oligonucleotide
  modified_base (9)..(9): a, c, g, t, unknown or other
  modified_base (12)..(12): a, c, g, t, unknown or other
  modified_base (15)..(15): a, c, g, t, unknown or other
  modified_base (18)..(18): a, c, g, t, unknown or other
  modified_base (21)..(21): a, c, g, t, unknown or other
caycayggnggnggnggnggn

SEQ ID NO: 3795 - DNA, 21 bp, Artificial Sequence
  Description of Artificial Sequence: Synthetic oligonucleotide
  modified_base (6)..(6): a, c, g, t, unknown or other
  modified_base (12)..(12): a, c, g, t, unknown or other
  modified_base (15)..(15): a, c, g, t, unknown or other
  modified_base (18)..(18): a, c, g, t, unknown or other
  modified_base (21)..(21): a, c, g, t, unknown or other
cayggncayggnggnggnggn

SEQ ID NO: 3796 - DNA, 21 bp, Artificial Sequence
  Description of Artificial Sequence: Synthetic oligonucleotide
  modified_base (6)..(6): a, c, g, t, unknown or other
  modified_base (9)..(9): a, c, g, t, unknown or other
  modified_base (15)..(15): a, c, g, t, unknown or other
  modified_base (18)..(18): a, c, g, t, unknown or other
  modified_base (21)..(21): a, c, g, t, unknown or other
cayggnggncayggnggnggn

SEQ ID NO: 3797 - DNA, 21 bp, Artificial Sequence
  Description of Artificial Sequence: Synthetic oligonucleotide
  modified_base (6)..(6): a, c, g, t, unknown or other
  modified_base (9)..(9): a, c, g, t, unknown or other
  modified_base (12)..(12): a, c, g, t, unknown or other
  modified_base (18)..(18): a, c, g, t, unknown or other
  modified_base (21)..(21): a, c, g, t, unknown or other
cayggnggnggncayggnggn

SEQ ID NO: 3798 - DNA, 21 bp, Artificial Sequence
  Description of Artificial Sequence: Synthetic oligonucleotide
  modified_base (6)..(6): a, c, g, t, unknown or other
  modified_base (9)..(9): a, c, g, t, unknown or other
  modified_base (12)..(12): a, c, g, t, unknown or other
  modified_base (15)..(15): a, c, g, t, unknown or other
  modified_base (21)..(21): a, c, g, t, unknown or other
cayggnggnggnggncayggn

SEQ ID NO: 3799 - DNA, 21 bp, Artificial Sequence
  Description of Artificial Sequence: Synthetic oligonucleotide
  modified_base (6)..(6): a, c, g, t, unknown or other
  modified_base (9)..(9): a, c, g, t, unknown or other
  modified_base (12)..(12): a, c, g, t, unknown or other
  modified_base (15)..(15): a, c, g, t, unknown or other
  modified_base (18)..(18): a, c, g, t, unknown or other
cayggnggnggnggnggncay

SEQ ID NO: 3800 - DNA, 21 bp, Artificial Sequence
  Description of Artificial Sequence: Synthetic oligonucleotide
  modified_base (3)..(3): a, c, g, t, unknown or other
  modified_base (12)..(12): a, c, g, t, unknown or other
  modified_base (15)..(15): a, c, g, t, unknown or other
  modified_base (18)..(18): a, c, g, t, unknown or other
  modified_base (21)..(21): a, c, g, t, unknown or other
ggncaycayggnggnggnggn

SEQ ID NO: 3801 - DNA, 21 bp, Artificial Sequence
  Description of Artificial Sequence: Synthetic oligonucleotide
  modified_base (3)..(3): a, c, g, t, unknown or other
  modified_base (9)..(9): a, c, g, t, unknown or other
  modified_base (15)..(15): a, c, g, t, unknown or other
  modified_base (18)..(18): a, c, g, t, unknown or other
  modified_base (21)..(21): a, c, g, t, unknown or other
ggncayggncayggnggnggn

SEQ ID NO: 3802 - DNA, 21 bp, Artificial Sequence
  Description of Artificial Sequence: Synthetic oligonucleotide
  modified_base (3)..(3): a, c, g, t, unknown or other
  modified_base (9)..(9): a, c, g, t, unknown or other
  modified_base (12)..(12): a, c, g, t, unknown or other
  modified_base (18)..(18): a, c, g, t, unknown or other
  modified_base (21)..(21): a, c, g, t, unknown or other
ggncayggnggncayggnggn

SEQ ID NO: 3803 - DNA, 21 bp, Artificial Sequence
  Description of Artificial Sequence: Synthetic oligonucleotide
  modified_base (3)..(3): a, c, g, t, unknown or other
  modified_base (9)..(9): a, c, g, t, unknown or other
  modified_base (12)..(12): a, c, g, t, unknown or other
  modified_base (15)..(15): a, c, g, t, unknown or other
  modified_base (21)..(21): a, c, g, t, unknown or other
ggncayggnggnggncayggn

SEQ ID NO: 3804 - DNA, 21 bp, Artificial Sequence
  Description of Artificial Sequence: Synthetic oligonucleotide
  modified_base (3)..(3): a, c, g, t, unknown or other
  modified_base (9)..(9): a, c, g, t, unknown or other
  modified_base (12)..(12): a, c, g, t, unknown or other
  modified_base (15)..(15): a, c, g, t, unknown or other
  modified_base (18)..(18): a, c, g, t, unknown or other
ggncayggnggnggnggncay

SEQ ID NO: 3805 - DNA, 21 bp, Artificial Sequence
  Description of Artificial Sequence: Synthetic oligonucleotide
  modified_base (3)..(3): a, c, g, t, unknown or other
  modified_base (6)..(6): a, c, g, t, unknown or other
  modified_base (15)..(15): a, c, g, t, unknown or other
  modified_base (18)..(18): a, c, g, t, unknown or other
  modified_base (21)..(21): a, c, g, t, unknown or other
ggnggncaycayggnggnggn

SEQ ID NO: 3806 - DNA, 21 bp, Artificial Sequence
  Description of Artificial Sequence: Synthetic oligonucleotide
  modified_base (3)..(3): a, c, g, t, unknown or other
  modified_base (6)..(6): a, c, g, t, unknown or other
  modified_base (12)..(12): a, c, g, t, unknown or other
  modified_base (18)..(18): a, c, g, t, unknown or other
  modified_base (21)..(21): a, c, g, t, unknown or other
ggnggncayggncayggnggn

SEQ ID NO: 3807 - DNA, 21 bp, Artificial Sequence
  Description of Artificial Sequence: Synthetic oligonucleotide
  modified_base (3)..(3): a, c, g, t, unknown or other
  modified_base (6)..(6): a, c, g, t, unknown or other
  modified_base (12)..(12): a, c, g, t, unknown or other
  modified_base (15)..(15): a, c, g, t, unknown or other
  modified_base (21)..(21): a, c, g, t, unknown or other
ggnggncayggnggncayggn

SEQ ID NO: 3808 - DNA, 21 bp, Artificial Sequence
  Description of Artificial Sequence: Synthetic oligonucleotide
  modified_base (3)..(3): a, c, g, t, unknown or other
  modified_base (6)..(6): a, c, g, t, unknown or other
  modified_base (12)..(12): a, c, g, t, unknown or other
  modified_base (15)..(15): a, c, g, t, unknown or other
  modified_base (18)..(18): a, c, g, t, unknown or other
ggnggncayggnggnggncay

SEQ ID NO: 3809 - DNA, 21 bp, Artificial Sequence
  Description of Artificial Sequence: Synthetic oligonucleotide
  modified_base (3)..(3): a, c, g, t, unknown or other
  modified_base (6)..(6): a, c, g, t, unknown or other
  modified_base (9)..(9): a, c, g, t, unknown or other
  modified_base (18)..(18): a, c, g, t, unknown or other
  modified_base (21)..(21): a, c, g, t, unknown or other
ggnggnggncaycayggnggn

SEQ ID NO: 3810 - DNA, 21 bp, Artificial Sequence
  Description of Artificial Sequence: Synthetic oligonucleotide
  modified_base (3)..(3): a, c, g, t, unknown or other
  modified_base (6)..(6): a, c, g, t, unknown or other
  modified_base (9)..(9): a, c, g, t, unknown or other
  modified_base (15)..(15): a, c, g, t, unknown or other
  modified_base (21)..(21): a, c, g, t, unknown or other
ggnggnggncayggncayggn

SEQ ID NO: 3811 - DNA, 21 bp, Artificial Sequence
  Description of Artificial Sequence: Synthetic oligonucleotide
  modified_base (3)..(3): a, c, g, t, unknown or other
  modified_base (6)..(6): a, c, g, t, unknown or other
  modified_base (9)..(9): a, c, g, t, unknown or other
  modified_base (15)..(15): a, c, g, t, unknown or other
  modified_base (18)..(18): a, c, g, t, unknown or other
ggnggnggncayggnggncay

SEQ ID NO: 3812 - DNA, 21 bp, Artificial Sequence
  Description of Artificial Sequence: Synthetic oligonucleotide
  modified_base (3)..(3): a, c, g, t, unknown or other
  modified_base (6)..(6): a, c, g, t, unknown or other
  modified_base (9)..(9): a, c, g, t, unknown or other
  modified_base (12)..(12): a, c, g, t, unknown or other
  modified_base (21)..(21): a, c, g, t, unknown or other
ggnggnggnggncaycayggn

SEQ ID NO: 3813 - DNA, 21 bp, Artificial Sequence
  Description of Artificial Sequence: Synthetic oligonucleotide
  modified_base (3)..(3): a, c, g, t, unknown or other
  modified_base (6)..(6): a, c, g, t, unknown or other
  modified_base (9)..(9): a, c, g, t, unknown or other
  modified_base (12)..(12): a, c, g, t, unknown or other
  modified_base (18)..(18): a, c, g, t, unknown or other
ggnggnggnggncayggncay

SEQ ID NO: 3814 - DNA, 21 bp, Artificial Sequence
  Description of Artificial Sequence: Synthetic oligonucleotide
  modified_base (3)..(3): a, c, g, t, unknown or other
  modified_base (6)..(6): a, c, g, t, unknown or other
  modified_base (9)..(9): a, c, g, t, unknown or other
  modified_base (12)..(12): a, c, g, t, unknown or other
  modified_base (15)..(15): a, c, g, t, unknown or other
  modified_base (18)..(18): a, c, g, t, unknown or other
ggnggnggnggnggnggncay

SEQ ID NO: 3815 - DNA, 21 bp, Artificial Sequence
  Description of Artificial Sequence: Synthetic oligonucleotide
  modified_base (6)..(6): a, c, g, t, unknown or other
  modified_base (9)..(9): a, c, g, t, unknown or other
  modified_base (12)..(12): a, c, g, t, unknown or other
  modified_base (15)..(15): a, c, g, t, unknown or other
  modified_base (18)..(18): a, c, g, t, unknown or other
  modified_base (21)..(21): a, c, g, t, unknown or other
cayggnggnggnggnggnggn

SEQ ID NO: 3816 - DNA, 21 bp, Artificial Sequence
  Description of Artificial Sequence: Synthetic oligonucleotide
  modified_base (3)..(3): a, c, g, t, unknown or other
  modified_base (9)..(9): a, c, g, t, unknown or other
  modified_base (12)..(12): a, c, g, t, unknown or other
  modified_base (15)..(15): a, c, g, t, unknown or other
  modified_base (18)..(18): a, c, g, t, unknown or other
  modified_base (21)..(21): a, c, g, t, unknown or other
ggncayggnggnggnggnggn

SEQ ID NO: 3817 - DNA, 21 bp, Artificial Sequence
  Description of Artificial Sequence: Synthetic oligonucleotide
  modified_base (3)..(3): a, c, g, t, unknown or other
  modified_base (6)..(6): a, c, g, t, unknown or other
  modified_base (12)..(12): a, c, g, t, unknown or other
  modified_base (15)..(15): a, c, g, t, unknown or other
  modified_base (18)..(18): a, c, g, t, unknown or other
  modified_base (21)..(21): a, c, g, t, unknown or other
ggnggncayggnggnggnggn

SEQ ID NO: 3818 - DNA, 21 bp, Artificial Sequence
  Description of Artificial Sequence: Synthetic oligonucleotide
  modified_base (3)..(3): a, c, g, t, unknown or other
  modified_base (6)..(6): a, c, g, t, unknown or other
  modified_base (9)..(9): a, c, g, t, unknown or other
  modified_base (15)..(15): a, c, g, t, unknown or other
  modified_base (18)..(18): a, c, g, t, unknown or other
  modified_base (21)..(21): a, c, g, t, unknown or other
ggnggnggncayggnggnggn

SEQ ID NO: 3819 - DNA, 21 bp, Artificial Sequence
  Description of Artificial Sequence: Synthetic oligonucleotide
  modified_base (3)..(3): a, c, g, t, unknown or other
  modified_base (6)..(6): a, c, g, t, unknown or other
  modified_base (9)..(9): a, c, g, t, unknown or other
  modified_base (12)..(12): a, c, g, t, unknown or other
  modified_base (18)..(18): a, c, g, t, unknown or other
  modified_base (21)..(21): a, c, g, t, unknown or other
ggnggnggnggncayggnggn

SEQ ID NO: 3820 - DNA, 21 bp, Artificial Sequence
  Description of Artificial Sequence: Synthetic oligonucleotide
  modified_base (3)..(3): a, c, g, t, unknown or other
  modified_base (6)..(6): a, c, g, t, unknown or other
  modified_base (9)..(9): a, c, g, t, unknown or other
  modified_base (12)..(12): a, c, g, t, unknown or other
  modified_base (15)..(15): a, c, g, t, unknown or other
  modified_base (21)..(21): a, c, g, t, unknown or other
ggnggnggnggnggncayggn

SEQ ID NO: 3821 - DNA, 12 bp, Artificial Sequence
  Description of Artificial Sequence: Synthetic oligonucleotide
  modified_base (3)..(3): a, c, g, t, unknown or other
  modified_base (6)..(6): a, c, g, t, unknown or other
  modified_base (9)..(9): a, c, g, t, unknown or other
ggnggnggnaay

SEQ ID NO: 3822 - DNA, 12 bp, Artificial Sequence
  Description of Artificial Sequence: Synthetic oligonucleotide
  modified_base (6)..(6): a, c, g, t, unknown or other
  modified_base (9)..(9): a, c, g, t, unknown or other
  modified_base (12)..(12): a, c, g, t, unknown or other
aayggnggnggn

SEQ ID NO: 3823 - DNA, 12 bp, Artificial Sequence
  Description of Artificial Sequence: Synthetic oligonucleotide
  modified_base (3)..(3): a, c, g, t, unknown or other
  modified_base (9)..(9): a, c, g, t, unknown or other
  modified_base (12)..(12): a, c, g, t, unknown or other
ggnaayggnggn

SEQ ID NO: 3824 - DNA, 12 bp, Artificial Sequence
  Description of Artificial Sequence: Synthetic oligonucleotide
  modified_base (3)..(3): a, c, g, t, unknown or other
  modified_base (6)..(6): a, c, g, t, unknown or other
  modified_base (12)..(12): a, c, g, t, unknown or other
ggnggnaayggn

SEQ ID NO: 3825 - DNA, 15 bp, Artificial Sequence
  Description of Artificial Sequence: Synthetic oligonucleotide
  modified_base (3)..(3): a, c, g, t, unknown or other
  modified_base (6)..(6): a, c, g, t, unknown or other
  modified_base (9)..(9): a, c, g, t, unknown or other
  modified_base (12)..(12): a, c, g, t, unknown or other
ggnggnggnggnaay

SEQ ID NO: 3826 - DNA, 15 bp, Artificial Sequence
  Description of Artificial Sequence: Synthetic oligonucleotide
  modified_base (6)..(6): a, c, g, t, unknown or other
  modified_base (9)..(9): a, c, g, t, unknown or other
  modified_base (12)..(12): a, c, g, t, unknown or other
  modified_base (15)..(15): a, c, g, t, unknown or other
aayggnggnggnggn

SEQ ID NO: 3827 - DNA, 15 bp, Artificial Sequence
  Description of Artificial Sequence: Synthetic oligonucleotide
  modified_base (3)..(3): a, c, g, t, unknown or other
  modified_base (9)..(9): a, c, g, t, unknown or other
  modified_base (12)..(12): a, c, g, t, unknown or other
  modified_base (15)..(15): a, c, g, t, unknown or other
ggnaayggnggnggn

SEQ ID NO: 3828 - DNA, 15 bp, Artificial Sequence
  Description of Artificial Sequence: Synthetic oligonucleotide
  modified_base (3)..(3): a, c, g, t, unknown or other
  modified_base (6)..(6): a, c, g, t, unknown or other
  modified_base (12)..(12): a, c, g, t, unknown or other
  modified_base (15)..(15): a, c, g, t, unknown or other
ggnggnaayggnggn

SEQ ID NO: 3829 - DNA, 15 bp, Artificial Sequence
  Description of Artificial Sequence: Synthetic oligonucleotide
  modified_base (3)..(3): a, c, g, t, unknown or other
  modified_base (6)..(6): a, c, g, t, unknown or other
  modified_base (9)..(9): a, c, g, t, unknown or other
  modified_base (15)..(15): a, c, g, t, unknown or other
ggnggnggnaayggn

SEQ ID NO: 3830 - DNA, 15 bp, Artificial Sequence
  Description of Artificial Sequence: Synthetic oligonucleotide
  modified_base (3)..(3): a, c, g, t, unknown or other
  modified_base (6)..(6): a, c, g, t, unknown or other
  modified_base (9)..(9): a, c, g, t, unknown or other
ggnggnggnaayaay

SEQ ID NO: 3831 - DNA, 15 bp, Artificial Sequence
  Description of Artificial Sequence: Synthetic oligonucleotide
  modified_base (9)..(9): a, c, g, t, unknown or other
  modified_base (12)..(12): a, c, g, t, unknown or other
  modified_base (15)..(15): a, c, g, t, unknown or other
aayaayggnggnggn

SEQ ID NO: 3832 - DNA, 15 bp, Artificial Sequence
  Description of Artificial Sequence: Synthetic oligonucleotide
  modified_base (6)..(6): a, c, g, t, unknown or other
  modified_base (12)..(12): a, c, g, t, unknown or other
  modified_base (15)..(15): a, c, g, t, unknown or other
aayggnaayggnggn

SEQ ID NO: 3833 - DNA, 15 bp, Artificial Sequence
  Description of Artificial Sequence: Synthetic oligonucleotide
  modified_base (6)..(6): a, c, g, t, unknown or other
  modified_base (9)..(9): a, c, g, t, unknown or other
  modified_base (15)..(15): a, c, g, t, unknown or other
aayggnggnaayggn

SEQ ID NO: 3834 - DNA, 15 bp, Artificial Sequence
  Description of Artificial Sequence: Synthetic oligonucleotide
  modified_base (6)..(6): a, c, g, t, unknown or other
  modified_base (9)..(9): a, c, g, t, unknown or other
  modified_base (12)..(12): a, c, g, t, unknown or other
aayggnggnggnaay

SEQ ID NO: 3835 - DNA, 15 bp, Artificial Sequence
  Description of Artificial Sequence: Synthetic oligonucleotide
  modified_base (3)..(3): a, c, g, t, unknown or other
  modified_base (12)..(12): a, c, g, t, unknown or other
  modified_base (15)..(15): a, c, g, t, unknown or other
ggnaayaayggnggn

SEQ ID NO: 3836 - DNA, 15 bp, Artificial Sequence
  Description of Artificial Sequence: Synthetic oligonucleotide
  modified_base (3)..(3): a, c, g, t, unknown or other
  modified_base (9)..(9): a, c, g, t, unknown or other
  modified_base (15)..(15): a, c, g, t, unknown or other
ggnaayggnaayggn

SEQ ID NO: 3837 - DNA, 15 bp, Artificial Sequence
  Description of Artificial Sequence: Synthetic oligonucleotide
  modified_base (3)..(3): a, c, g, t, unknown or other
  modified_base (9)..(9): a, c, g, t, unknown or other
  modified_base (12)..(12): a, c, g, t, unknown or other
ggnaayggnggnaay

SEQ ID NO: 3838 - DNA, 15 bp, Artificial Sequence
  Description of Artificial Sequence: Synthetic oligonucleotide
  modified_base (3)..(3): a, c, g, t, unknown or other
  modified_base (6)..(6): a, c, g, t, unknown or other
  modified_base (15)..(15): a, c, g, t, unknown or other
ggnggnaayaayggn

SEQ ID NO: 3839 - DNA, 15 bp, Artificial Sequence
  Description of Artificial Sequence: Synthetic oligonucleotide
  modified_base (3)..(3): a, c, g, t, unknown or other
  modified_base (6)..(6): a, c, g, t, unknown or other
  modified_base (12)..(12): a, c, g, t, unknown or other
ggnggnaayggnaay

SEQ ID NO: 3840 - DNA, 18 bp, Artificial Sequence
  Description of Artificial Sequence: Synthetic oligonucleotide
  modified_base (3)..(3): a, c, g, t, unknown or other
  modified_base (6)..(6): a, c, g, t, unknown or other
  modified_base (9)..(9): a, c, g, t, unknown or other
  modified_base (12)..(12): a, c, g, t, unknown or other
  modified_base (15)..(15): a, c, g, t, unknown or other
ggnggnggnggnggnaay

SEQ ID NO: 3841 - DNA, 18 bp, Artificial Sequence
  Description of Artificial Sequence: Synthetic oligonucleotide
  modified_base (6)..(6): a, c, g, t, unknown or other
  modified_base (9)..(9): a, c, g, t, unknown or other
  modified_base (12)..(12): a, c, g, t, unknown or other
  modified_base (15)..(15): a, c, g, t, unknown or other
  modified_base (18)..(18): a, c, g, t, unknown or other
aayggnggnggnggnggn

SEQ ID NO: 3842 - DNA, 18 bp, Artificial Sequence
  Description of Artificial Sequence: Synthetic oligonucleotide
  modified_base (3)..(3): a, c, g, t, unknown or other
  modified_base (9)..(9): a, c, g, t, unknown or other
  modified_base (12)..(12): a, c, g, t, unknown or other
  modified_base (15)..(15): a, c, g, t, unknown or other
  modified_base (18)..(18): a, c, g, t, unknown or other
ggnaayggnggnggnggn

SEQ ID NO: 3843 - DNA, 18 bp, Artificial Sequence
  Description of Artificial Sequence: Synthetic oligonucleotide
  modified_base (3)..(3): a, c, g, t, unknown or other
  modified_base (6)..(6): a, c, g, t, unknown or other
  modified_base (12)..(12): a, c, g, t, unknown or other
  modified_base (15)..(15): a, c, g, t, unknown or other
  modified_base (18)..(18): a, c, g, t, unknown or other
ggnggnaayggnggnggn

SEQ ID NO: 3844 - DNA, 18 bp, Artificial Sequence
  Description of Artificial Sequence: Synthetic oligonucleotide
  modified_base (3)..(3): a, c, g, t, unknown or other
  modified_base (6)..(6): a, c, g, t, unknown or other
  modified_base (9)..(9): a, c, g, t, unknown or other
  modified_base (15)..(15): a, c, g, t, unknown or other
  modified_base (18)..(18): a, c, g, t, unknown or other
ggnggnggnaayggnggn

SEQ ID NO: 3845 - DNA, 18 bp, Artificial Sequence
  Description of Artificial Sequence: Synthetic oligonucleotide
  modified_base (3)..(3): a, c, g, t, unknown or other
  modified_base (6)..(6): a, c, g, t, unknown or other
  modified_base (9)..(9): a, c, g, t, unknown or other
  modified_base (12)..(12): a, c, g, t, unknown or other
  modified_base (18)..(18): a, c, g, t, unknown or other
ggnggnggnggnaayggn

SEQ ID NO: 3846 - DNA, 18 bp, Artificial Sequence
  Description of Artificial Sequence: Synthetic oligonucleotide
  modified_base (3)..(3): a, c, g, t, unknown or other
  modified_base (6)..(6): a, c, g, t, unknown or other
  modified_base (9)..(9): a, c, g, t, unknown or other
  modified_base (12)..(12): a, c, g, t, unknown or other
ggnggnggnggnaayaay

SEQ ID NO: 3847 - DNA, 18 bp, Artificial Sequence
  Description of Artificial Sequence: Synthetic oligonucleotide
  modified_base (9)..(9): a, c, g, t, unknown or other
  modified_base (12)..(12): a, c, g, t, unknown or other
  modified_base (15)..(15): a, c, g, t, unknown or other
  modified_base (18)..(18): a, c, g, t, unknown or other
aayaayggnggnggnggn

SEQ ID NO: 3848 - DNA, 18 bp, Artificial Sequence
  Description of Artificial Sequence: Synthetic oligonucleotide
  modified_base (6)..(6): a, c, g, t, unknown or other
  modified_base (12)..(12): a, c, g, t, unknown or other
  modified_base (15)..(15): a, c, g, t, unknown or other
  modified_base (18)..(18): a, c, g, t, unknown or other
aayggnaayggnggnggn

SEQ ID NO: 3849 - DNA, 18 bp, Artificial Sequence
  Description of Artificial Sequence: Synthetic oligonucleotide
  modified_base (6)..(6): a, c, g, t, unknown or other
  modified_base (9)..(9): a, c, g, t, unknown or other
  modified_base (15)..(15): a, c, g, t, unknown or other
  modified_base (18)..(18): a, c, g, t, unknown or other
aayggnggnaayggnggn

SEQ ID NO: 3850 - DNA, 18 bp, Artificial Sequence
  Description of Artificial Sequence: Synthetic oligonucleotide
  modified_base (6)..(6): a, c, g, t, unknown or other
  modified_base (9)..(9): a, c, g, t, unknown or other
  modified_base (12)..(12): a, c, g, t, unknown or other
  modified_base (18)..(18): a, c, g, t, unknown or other
aayggnggnggnaayggn

SEQ ID NO: 3851 - DNA, 18 bp, Artificial Sequence
  Description of Artificial Sequence: Synthetic oligonucleotide
  modified_base (6)..(6): a, c, g, t, unknown or other
  modified_base (9)..(9): a, c, g, t, unknown or other
  modified_base (12)..(12): a, c, g, t, unknown or other
  modified_base (15)..(15): a, c, g, t, unknown or other
aayggnggnggnggnaay

SEQ ID NO: 3852 - DNA, 18 bp, Artificial Sequence
  Description of Artificial Sequence: Synthetic oligonucleotide
  modified_base (3)..(3): a, c, g, t, unknown or other
  modified_base (12)..(12): a, c, g, t, unknown or other
  modified_base (15)..(15): a, c, g, t, unknown or other
  modified_base (18)..(18): a, c, g, t, unknown or other
ggnaayaayggnggnggn

SEQ ID NO: 3853 - DNA, 18 bp, Artificial Sequence
  Description of Artificial Sequence: Synthetic oligonucleotide
  modified_base (3)..(3): a, c, g, t, unknown or other
  modified_base (9)..(9): a, c, g, t, unknown or other
  modified_base (15)..(15): a, c, g, t, unknown or other
  modified_base (18)..(18): a, c, g, t, unknown or other
ggnaayggnaayggnggn

SEQ ID NO: 3854 - DNA, 18 bp, Artificial Sequence
  Description of Artificial Sequence: Synthetic oligonucleotide
  modified_base (3)..(3): a, c, g, t, unknown or other
  modified_base (9)..(9): a, c, g, t, unknown or other
  modified_base (12)..(12): a, c, g, t, unknown or other
  modified_base (18)..(18): a, c, g, t, unknown or other
ggnaayggnggnaayggn

SEQ ID NO: 3855 - DNA, 18 bp, Artificial Sequence
  Description of Artificial Sequence: Synthetic oligonucleotide
  modified_base (3)..(3): a, c, g, t, unknown or other
  modified_base (9)..(9): a, c, g, t, unknown or other
  modified_base (12)..(12): a, c, g, t, unknown or other
  modified_base (15)..(15): a, c, g, t, unknown or other
ggnaayggnggnggnaay

SEQ ID NO: 3856 - DNA, 18 bp, Artificial Sequence
  Description of Artificial Sequence: Synthetic oligonucleotide
  modified_base (3)..(3): a, c, g, t, unknown or other
  modified_base (6)..(6): a, c, g, t, unknown or other
  modified_base (15)..(15): a, c, g, t, unknown or other
  modified_base (18)..(18): a, c, g, t, unknown or other
ggnggnaayaayggnggn

SEQ ID NO: 3857 - DNA, 18 bp, Artificial Sequence
  Description of Artificial Sequence: Synthetic oligonucleotide
  modified_base (3)..(3): a, c, g, t, unknown or other
  modified_base (6)..(6): a, c, g, t, unknown or other
  modified_base (12)..(12): a, c, g, t, unknown or other
  modified_base (18)..(18): a, c, g, t, unknown or other
ggnggnaayggnaayggn

SEQ ID NO: 3858 - DNA, 18 bp, Artificial Sequence
  Description of Artificial Sequence: Synthetic oligonucleotide
  modified_base (3)..(3): a, c, g, t, unknown or other
  modified_base (6)..(6): a, c, g, t, unknown or other
  modified_base (12)..(12): a, c, g, t, unknown or other
  modified_base (15)..(15): a, c, g, t, unknown or other
ggnggnaayggnggnaay

SEQ ID NO: 3859 - DNA, 18 bp, Artificial Sequence
  Description of Artificial Sequence: Synthetic oligonucleotide
  modified_base (3)..(3): a, c, g, t, unknown or other
  modified_base (6)..(6): a, c, g, t, unknown or other
  modified_base (9)..(9): a, c, g, t, unknown or other
  modified_base (18)..(18): a, c, g, t, unknown or other
ggnggnggnaayaayggn

SEQ ID NO: 3860 - DNA, 18 bp, Artificial Sequence
  Description of Artificial Sequence: Synthetic oligonucleotide
  modified_base (3)..(3): a, c, g, t, unknown or other
  modified_base (6)..(6): a, c, g, t, unknown or other
  modified_base (9)..(9): a, c, g, t, unknown or other
  modified_base (15)..(15): a, c, g, t, unknown or other
ggnggnggnaayggnaay

SEQ ID NO: 3861 - DNA, 21 bp, Artificial Sequence
  Description of Artificial Sequence: Synthetic oligonucleotide
  modified_base (3)..(3): a, c, g, t, unknown or other
  modified_base (6)..(6): a, c, g, t, unknown or other
  modified_base (9)..(9): a, c, g, t, unknown or other
  modified_base (12)..(12): a, c, g, t, unknown or other
ggnggnggnggnaayaayaay

SEQ ID NO: 3862 - DNA, 21 bp, Artificial Sequence
  Description of Artificial Sequence: Synthetic oligonucleotide
  modified_base (12)..(12): a, c, g, t, unknown or other
  modified_base (15)..(15): a, c, g, t, unknown or other
  modified_base (18)..(18): a, c, g, t, unknown or other
  modified_base (21)..(21): a, c, g, t, unknown or other
aayaayaayggnggnggnggn

SEQ ID NO: 3863 - DNA, 21 bp, Artificial Sequence
  Description of Artificial Sequence: Synthetic oligonucleotide
  modified_base (6)..(6): a, c, g, t, unknown or other
  modified_base (15)..(15): a, c, g, t, unknown or other
  modified_base (18)..(18): a, c, g, t, unknown or other
  modified_base (21)..(21): a, c, g, t, unknown or other
aayggnaayaayggnggnggn

SEQ ID NO: 3864 - DNA, 21 bp, Artificial Sequence
  Description of Artificial Sequence: Synthetic oligonucleotide
  modified_base (6)..(6): a, c, g, t, unknown or other
  modified_base (12)..(12): a, c, g, t, unknown or other
  modified_base (18)..(18): a, c, g, t, unknown or other
  modified_base (21)..(21): a, c, g, t, unknown or other
aayggnaayggnaayggnggn

SEQ ID NO: 3865 - DNA, 21 bp, Artificial Sequence
  Description of Artificial Sequence: Synthetic oligonucleotide
  modified_base (6)..(6): a, c, g, t, unknown or other
  modified_base (12)..(12): a, c, g, t, unknown or other
  modified_base (15)..(15): a, c, g, t, unknown or other
  modified_base (21)..(21): a, c, g, t, unknown or other
aayggnaayggnggnaayggn

SEQ ID NO: 3866 - DNA, 21 bp, Artificial Sequence
  Description of Artificial Sequence: Synthetic oligonucleotide
  modified_base (6)..(6): a, c, g, t, unknown or other
  modified_base (12)..(12): a, c, g, t, unknown or other
  modified_base (15)..(15): a, c, g, t, unknown or other
  modified_base (18)..(18): a, c, g, t, unknown or other
aayggnaayggnggnggnaay

SEQ ID NO: 3867 - DNA, 21 bp, Artificial Sequence
  Description of Artificial Sequence: Synthetic oligonucleotide
  modified_base (6)..(6): a, c, g, t, unknown or other
  modified_base (9)..(9): a, c, g, t, unknown or other
  modified_base (18)..(18): a, c, g, t, unknown or other
  modified_base (21)..(21): a, c, g, t, unknown or other
aayggnggnaayaayggnggn

SEQ ID NO: 3868 - DNA, 21 bp, Artificial Sequence
  Description of Artificial Sequence: Synthetic oligonucleotide
  modified_base (6)..(6): a, c, g, t, unknown or other
  modified_base (9)..(9): a, c, g, t, unknown or other
  modified_base (15)..(15): a, c, g, t, unknown or other
  modified_base (21)..(21): a, c, g, t, unknown or other
aayggnggnaayggnaayggn

SEQ ID NO: 3869 - DNA, 21 bp, Artificial Sequence
  Description of Artificial Sequence: Synthetic oligonucleotide
  modified_base (6)..(6): a, c, g, t, unknown or other
  modified_base (9)..(9): a, c, g, t, unknown or other
  modified_base (15)..(15): a, c, g, t, unknown or other
  modified_base (18)..(18): a, c, g, t, unknown or other
aayggnggnaayggnggnaay

SEQ ID NO: 3870 - DNA, 21 bp, Artificial Sequence
  Description of Artificial Sequence: Synthetic oligonucleotide
  modified_base (6)..(6): a, c, g, t, unknown or other
  modified_base (9)..(9): a, c, g, t, unknown or other
  modified_base (12)..(12): a, c, g, t, unknown or other
  modified_base (18)..(18): a, c, g, t, unknown or other
aayggnggnggnaayggnaay

SEQ ID NO: 3871 - DNA, 21 bp, Artificial Sequence
  Description of Artificial Sequence: Synthetic oligonucleotide
  modified_base (6)..(6): a, c, g, t, unknown or other
  modified_base (9)..(9): a, c, g, t, unknown or other
  modified_base (12)..(12): a, c, g, t, unknown or other
  modified_base (21)..(21): a, c, g, t, unknown or other
aayggnggnggnaayaayggn

SEQ ID NO: 3872 - DNA, 21 bp, Artificial Sequence
  Description of Artificial Sequence: Synthetic oligonucleotide
  modified_base (6)..(6): a, c, g, t, unknown or other
  modified_base (9)..(9): a, c, g, t, unknown or other
  modified_base (12)..(12): a, c, g, t, unknown or other
  modified_base (15)..(15): a, c, g, t, unknown or other
aayggnggnggnggnaayaay

SEQ ID NO: 3873 - DNA, 21 bp, Artificial Sequence
  Description of Artificial Sequence: Synthetic oligonucleotide
  modified_base (9)..(9): a, c, g, t, unknown or other
  modified_base (15)..(15): a, c, g, t, unknown or other
  modified_base (18)..(18): a, c, g, t, unknown or other
  modified_base (21)..(21): a, c, g, t, unknown or other
aayaayggnaayggnggnggn

SEQ ID NO: 3874 - DNA, 21 bp, Artificial Sequence
  Description of Artificial Sequence: Synthetic oligonucleotide
  modified_base (9)..(9): a, c, g, t, unknown or other
  modified_base (12)..(12): a, c, g, t, unknown or other
  modified_base (18)..(18): a, c, g, t, unknown or other
  modified_base (21)..(21): a, c, g, t, unknown or other
aayaayggnggnaayggnggn

SEQ ID NO: 3875 - DNA, 21 bp, Artificial Sequence
  Description of Artificial Sequence: Synthetic oligonucleotide
  modified_base (9)..(9): a, c, g, t, unknown or other
  modified_base (12)..(12): a, c, g, t, unknown or other
  modified_base (15)..(15): a, c, g, t, unknown or other
  modified_base (21)..(21): a, c, g, t, unknown or other
aayaayggnggnggnaayggn

SEQ ID NO: 3876 - DNA, 21 bp, Artificial Sequence
  Description of Artificial Sequence: Synthetic oligonucleotide
  modified_base (9)..(9): a, c, g, t, unknown or other
  modified_base (12)..(12): a, c, g, t, unknown or other
  modified_base (15)..(15): a, c, g, t, unknown or other
  modified_base (18)..(18): a, c, g, t, unknown or other
aayaayggnggnggnggnaay

SEQ ID NO: 3877 - DNA, 21 bp, Artificial Sequence
  Description of Artificial Sequence: Synthetic oligonucleotide
  modified_base (3)..(3): a, c, g, t, unknown or other
  modified_base (15)..(15): a, c, g, t, unknown or other
  modified_base (18)..(18): a, c, g, t, unknown or other
  modified_base (21)..(21): a, c, g, t, unknown or other
ggnaayaayaayggnggnggn

SEQ ID NO: 3878 - DNA, 21 bp, Artificial Sequence
  Description of Artificial Sequence: Synthetic oligonucleotide
  modified_base (3)..(3): a, c, g, t, unknown or other
  modified_base (12)..(12): a, c, g, t, unknown or other
  modified_base (18)..(18): a, c, g, t, unknown or other
  modified_base (21)..(21): a, c, g, t, unknown or other
ggnaayaayggnaayggnggn

SEQ ID NO: 3879 - DNA, 21 bp, Artificial Sequence
  Description of Artificial Sequence: Synthetic oligonucleotide
  modified_base (3)..(3): a, c, g, t, unknown or other
  modified_base (12)..(12): a, c, g, t, unknown or other
  modified_base (15)..(15): a, c, g, t, unknown or other
  modified_base (21)..(21): a, c, g, t, unknown or other
ggnaayaayggnggnaayggn

SEQ ID NO: 3880 - DNA, 21 bp, Artificial Sequence
  Description of Artificial Sequence: Synthetic oligonucleotide
  modified_base (3)..(3): a, c, g, t, unknown or other
  modified_base (12)..(12): a, c, g, t, unknown or other
  modified_base (15)..(15): a, c, g, t, unknown or other
  modified_base (18)..(18): a, c, g, t, unknown or other
ggnaayaayggnggnggnaay

SEQ ID NO: 3881 - DNA, 21 bp, Artificial Sequence
  Description of Artificial Sequence: Synthetic oligonucleotide
  modified_base (3)..(3): a, c, g, t, unknown or other
  modified_base (9)..(9): a, c, g, t, unknown or other
  modified_base (18)..(18): a, c, g, t, unknown or other
  modified_base (21)..(21): a, c, g, t, unknown or other
ggnaayggnaayaayggnggn

SEQ ID NO: 3882 - DNA, 21 bp, Artificial Sequence
  Description of Artificial Sequence: Synthetic oligonucleotide
  modified_base (3)..(3): a, c, g, t, unknown or other
  modified_base (9)..(9): a, c, g, t, unknown or other
  modified_base (12)..(12): a, c, g, t, unknown or other
  modified_base (21)..(21): a, c, g, t, unknown or other
ggnaayggnggnaayaayggn

SEQ ID NO: 3883 - DNA, 21 bp, Artificial Sequence
  Description of Artificial Sequence: Synthetic oligonucleotide
  modified_base (3)..(3): a, c, g, t, unknown or other
  modified_base (9)..(9): a, c, g, t, unknown or other
  modified_base (12)..(12): a, c, g, t, unknown or other
  modified_base (15)..(15): a, c, g, t, unknown or other
ggnaayggnggnggnaayaay

SEQ ID NO: 3884 - DNA, 21 bp, Artificial Sequence
  Description of Artificial Sequence: Synthetic oligonucleotide
  modified_base (3)..(3): a, c, g, t, unknown or other
  modified_base (9)..(9): a, c, g, t, unknown or other
  modified_base (15)..(15): a, c, g, t, unknown or other
  modified_base (21)..(21): a, c, g, t, unknown or other
ggnaayggnaayggnaayggn

SEQ ID NO: 3885 - DNA, 21 bp, Artificial Sequence
  Description of Artificial Sequence: Synthetic oligonucleotide
  modified_base (3)..(3): a, c, g, t, unknown or other
  modified_base (9)..(9): a, c, g, t, unknown or other
  modified_base (15)..(15): a, c, g, t, unknown or other
  modified_base (18)..(18): a, c, g, t, unknown or other
ggnaayggnaayggnggnaay

SEQ ID NO: 3886 - DNA, 21 bp, Artificial Sequence
  Description of Artificial Sequence: Synthetic oligonucleotide
  modified_base (3)..(3): a, c, g, t, unknown or other
  modified_base (9)..(9): a, c, g, t, unknown or other
  modified_base (12)..(12): a, c, g, t, unknown or other
  modified_base (18)..(18): a, c, g, t, unknown or other
ggnaayggnggnaayggnaay

SEQ ID NO: 3887 - DNA, 21 bp, Artificial Sequence
  Description of Artificial Sequence: Synthetic oligonucleotide
  modified_base (3)..(3): a, c, g, t, unknown or other
  modified_base (6)..(6): a, c, g, t, unknown or other
  modified_base (18)..(18): a, c, g, t, unknown or other
  modified_base (21)..(21): a, c, g, t, unknown or other
ggnggnaayaayaayggnggn

SEQ ID NO: 3888 - DNA, 21 bp, Artificial Sequence
  Description of Artificial Sequence: Synthetic oligonucleotide
  modified_base (3)..(3): a, c, g, t, unknown or other
  modified_base (6)..(6): a, c, g, t, unknown or other
  modified_base (15)..(15): a, c, g, t, unknown or other
  modified_base (21)..(21): a, c, g, t, unknown or other
ggnggnaayaayggnaayggn

SEQ ID NO: 3889 - DNA, 21 bp, Artificial Sequence
  Description of Artificial Sequence: Synthetic oligonucleotide
  modified_base (3)..(3): a, c, g, t, unknown or other
  modified_base (6)..(6): a, c, g, t, unknown or other
  modified_base (15)..(15): a, c, g, t, unknown or other
  modified_base (18)..(18): a, c, g, t, unknown or other
ggnggnaayaayggnggnaay

SEQ ID NO: 3890 - DNA, 21 bp, Artificial Sequence
  Description of Artificial Sequence: Synthetic oligonucleotide
  modified_base (3)..(3): a, c, g, t, unknown or other
  modified_base (6)..(6): a, c, g, t, unknown or other
  modified_base (12)..(12): a, c, g, t, unknown or other
  modified_base (21)..(21): a, c, g, t, unknown or other
ggnggnaayggnaayaayggn

SEQ ID NO: 3891 - DNA, 21 bp, Artificial Sequence
  Description of Artificial Sequence: Synthetic oligonucleotide
  modified_base (3)..(3): a, c, g, t, unknown or other
  modified_base (6)..(6): a, c, g, t, unknown or other
  modified_base (12)..(12): a, c, g, t, unknown or other
  modified_base (18)..(18): a, c, g, t, unknown or other
ggnggnaayggnaayggnaay

SEQ ID NO: 3892 - DNA, 21 bp, Artificial Sequence
  Description of Artificial Sequence: Synthetic oligonucleotide
  modified_base (3)..(3): a, c, g, t, unknown or other
  modified_base (6)..(6): a, c, g, t, unknown or other
  modified_base (12)..(12): a, c, g, t, unknown or other
  modified_base (15)..(15): a, c, g, t, unknown or other
ggnggnaayggnggnaayaay

SEQ ID NO: 3893 - DNA, 21 bp, Artificial Sequence
  Description of Artificial Sequence: Synthetic oligonucleotide
  modified_base (3)..(3): a, c, g, t, unknown or other
  modified_base (6)..(6): a, c, g, t, unknown or other
  modified_base (9)..(9): a, c, g, t, unknown or other
  modified_base (21)..(21): a, c, g, t, unknown or other
ggnggnggnaayaayaayggn

SEQ ID NO: 3894 - DNA, 21 bp, Artificial Sequence
  Description of Artificial Sequence: Synthetic oligonucleotide
  modified_base (3)..(3): a, c, g, t, unknown or other
  modified_base (6)..(6): a, c, g, t, unknown or other
  modified_base (9)..(9): a, c, g, t, unknown or other
  modified_base (18)..(18): a, c, g, t, unknown or other
ggnggnggnaayaayggnaay

SEQ ID NO: 3895 - DNA, 21 bp, Artificial Sequence
  Description of Artificial Sequence: Synthetic oligonucleotide
  modified_base (3)..(3): a, c, g, t, unknown or other
  modified_base (6)..(6): a, c, g, t, unknown or other
  modified_base (9)..(9): a, c, g, t, unknown or other
  modified_base (15)..(15): a, c, g, t, unknown or other
ggnggnggnaayggnaayaay

SEQ ID NO: 3896 - DNA, 21 bp, Artificial Sequence
  Description of Artificial Sequence: Synthetic oligonucleotide
  modified_base (3)..(3): a, c, g, t, unknown or other
  modified_base (6)..(6): a, c, g, t, unknown or other
  modified_base (9)..(9): a, c, g, t, unknown or other
  modified_base (12)..(12): a, c, g, t, unknown or other
  modified_base (15)..(15): a, c, g, t, unknown or other
ggnggnggnggnggnaayaay

SEQ ID NO: 3897 - DNA, 21 bp, Artificial Sequence
  Description of Artificial Sequence: Synthetic oligonucleotide
  modified_base (9)..(9): a, c, g, t, unknown or other
  modified_base (12)..(12): a, c, g, t, unknown or other
  modified_base (15)..(15): a, c, g, t, unknown or other
  modified_base (18)..(18): a, c, g, t, unknown or other
  modified_base (21)..(21): a, c, g, t, unknown or other
aayaayggnggnggnggnggn

SEQ ID NO: 3898 - DNA, 21 bp, Artificial Sequence
  Description of Artificial Sequence: Synthetic oligonucleotide
  modified_base (6)..(6): a, c, g, t, unknown or other
  modified_base (12)..(12): a, c, g, t, unknown or other
  modified_base (15)..(15): a, c, g, t, unknown or other
  modified_base (18)..(18): a, c, g, t, unknown or other
  modified_base (21)..(21): a, c, g, t, unknown or other
aayggnaayggnggnggnggn

SEQ ID NO: 3899 - DNA, 21 bp, Artificial Sequence
  Description of Artificial Sequence: Synthetic oligonucleotide
  modified_base (6)..(6): a, c, g, t, unknown or other
  modified_base (9)..(9): a, c, g, t, unknown or other
  modified_base (15)..(15): a, c, g, t, unknown or other
  modified_base (18)..(18): a, c, g, t, unknown or other
  modified_base (21)..(21): a, c, g, t, unknown or other
aayggnggnaayggnggnggn

SEQ ID NO: 3900 - DNA, 21 bp, Artificial Sequence
  Description of Artificial Sequence: Synthetic oligonucleotide
  modified_base (6)..(6): a, c, g, t, unknown or other
  modified_base (9)..(9): a, c, g, t, unknown or other
  modified_base (12)..(12): a, c, g, t, unknown or other
  modified_base (18)..(18): a, c, g, t, unknown or other
  modified_base (21)..(21): a, c, g, t, unknown or other
aayggnggnggnaayggnggn

SEQ ID NO: 3901 - DNA, 21 bp, Artificial Sequence
  Description of Artificial Sequence: Synthetic oligonucleotide
  modified_base (6)..(6): a, c, g, t, unknown or other
  modified_base (9)..(9): a, c, g, t, unknown or other
  modified_base (12)..(12): a, c, g, t, unknown or other
  modified_base (15)..(15): a, c, g, t, unknown or other
  modified_base (21)..(21): a, c, g, t, unknown or other
aayggnggnggnggnaayggn

SEQ ID NO: 3902 - DNA, 21 bp, Artificial Sequence
  Description of Artificial Sequence: Synthetic oligonucleotide
  modified_base (6)..(6): a, c, g, t, unknown or other
  modified_base (9)..(9): a, c, g, t, unknown or other
  modified_base (12)..(12): a, c, g, t, unknown or other
  modified_base (15)..(15): a, c, g, t, unknown or other
  modified_base (18)..(18): a, c, g, t, unknown or other
aayggnggnggnggnggnaay

SEQ ID NO: 3903 - DNA, 21 bp, Artificial Sequence
  Description of Artificial Sequence: Synthetic oligonucleotide
  modified_base (3)..(3): a, c, g, t, unknown or other
  modified_base (12)..(12): a, c, g, t, unknown or other
  modified_base (15)..(15): a, c, g, t, unknown or other
  modified_base (18)..(18): a, c, g, t, unknown or other
  modified_base (21)..(21): a, c, g, t, unknown or other
ggnaayaayggnggnggnggn

SEQ ID NO: 3904 - DNA, 21 bp, Artificial Sequence
  Description of Artificial Sequence: Synthetic oligonucleotide
  modified_base (3)..(3): a, c, g, t, unknown or other
  modified_base (9)..(9): a, c, g, t, unknown or other
  modified_base (15)..(15): a, c, g, t, unknown or other
  modified_base (18)..(18): a, c, g, t, unknown or other
  modified_base (21)..(21): a, c, g, t, unknown or other
ggnaayggnaayggnggnggn

SEQ ID NO: 3905 - DNA, 21 bp, Artificial Sequence
  Description of Artificial Sequence: Synthetic oligonucleotide
  modified_base (3)..(3): a, c, g, t, unknown or other
  modified_base (9)..(9): a, c, g, t, unknown or other
  modified_base (12)..(12): a, c, g, t, unknown or other
  modified_base (18)..(18): a, c, g, t, unknown or other
  modified_base (21)..(21): a, c, g, t, unknown or other
ggnaayggnggnaayggnggn

SEQ ID NO: 3906 - DNA, 21 bp, Artificial Sequence
  Description of Artificial Sequence: Synthetic oligonucleotide
  modified_base (3)..(3): a, c, g, t, unknown or other
  modified_base (9)..(9): a, c, g, t, unknown or other
  modified_base (12)..(12): a, c, g, t, unknown or other
  modified_base (15)..(15): a, c, g, t, unknown or other
  modified_base (21)..(21): a, c, g, t, unknown or other
ggnaayggnggnggnaayggn

SEQ ID NO: 3907 - DNA, 21 bp, Artificial Sequence
  Description of Artificial Sequence: Synthetic oligonucleotide
  modified_base (3)..(3): a, c, g, t, unknown or other
  modified_base (9)..(9): a, c, g, t, unknown or other
  modified_base (12)..(12): a, c, g, t, unknown or other
  modified_base (15)..(15): a, c, g, t, unknown or other
  modified_base (18)..(18): a, c, g, t, unknown or other
ggnaayggnggnggnggnaay

SEQ ID NO: 3908 - DNA, 21 bp, Artificial Sequence
  Description of Artificial Sequence: Synthetic oligonucleotide
  modified_base (3)..(3): a, c, g, t, unknown or other
  modified_base (6)..(6): a, c, g, t, unknown or other
  modified_base (15)..(15): a, c, g, t, unknown or other
  modified_base (18)..(18): a, c, g, t, unknown or other
  modified_base (21)..(21): a, c, g, t, unknown or other
ggnggnaayaayggnggnggn

SEQ ID NO: 3909 - DNA, 21 bp, Artificial Sequence
  Description of Artificial Sequence: Synthetic oligonucleotide
  modified_base (3)..(3): a, c, g, t, unknown or other
  modified_base (6)..(6): a, c, g, t, unknown or other
  modified_base (12)..(12): a, c, g, t, unknown or other
  modified_base (18)..(18): a, c, g, t, unknown or other
  modified_base (21)..(21): a, c, g, t, unknown or other
ggnggnaayggnaayggnggn

SEQ ID NO: 3910 - DNA, 21 bp, Artificial Sequence
  Description of Artificial Sequence: Synthetic oligonucleotide
  modified_base (3)..(3): a, c, g, t, unknown or other
  modified_base (6)..(6): a, c, g, t, unknown or other
  modified_base (12)..(12): a, c, g, t, unknown or other
  modified_base (15)..(15): a, c, g, t, unknown or other
  modified_base (21)..(21): a, c, g, t, unknown or other
ggnggnaayggnggnaayggn

SEQ ID NO: 3911 - DNA, 21 bp, Artificial Sequence
  Description of Artificial Sequence: Synthetic oligonucleotide
  modified_base (3)..(3): a, c, g, t, unknown or other
  modified_base (6)..(6): a, c, g, t, unknown or other
  modified_base (12)..(12): a, c, g, t, unknown or other
  modified_base (15)..(15): a, c, g, t, unknown or other
  modified_base (18)..(18): a, c, g, t, unknown or other
ggnggnaayggnggnggnaay

SEQ ID NO: 3912 - DNA, 21 bp, Artificial Sequence
  Description of Artificial Sequence: Synthetic oligonucleotide
  modified_base (3)..(3): a, c, g, t, unknown or other
  modified_base (6)..(6): a, c, g, t, unknown or other
  modified_base (9)..(9): a, c, g, t, unknown or other
  modified_base (18)..(18): a, c, g, t, unknown or other
  modified_base (21)..(21): a, c, g, t, unknown or other
ggnggnggnaayaayggnggn

SEQ ID NO: 3913 - DNA, 21 bp, Artificial Sequence
  Description of Artificial Sequence: Synthetic oligonucleotide
  modified_base (3)..(3): a, c, g, t, unknown or other
  modified_base (6)..(6): a, c, g, t, unknown or other
  modified_base (9)..(9): a, c, g, t, unknown or other
  modified_base (15)..(15): a, c, g, t, unknown or other
  modified_base (21)..(21): a, c, g, t, unknown or other
ggnggnggnaayggnaayggn

SEQ ID NO: 3914 - DNA, 21 bp, Artificial Sequence
  Description of Artificial Sequence: Synthetic oligonucleotide
  modified_base (3)..(3): a, c, g, t, unknown or other
  modified_base (6)..(6): a, c, g, t, unknown or other
  modified_base (9)..(9): a, c, g, t, unknown or other
  modified_base (15)..(15): a, c, g, t, unknown or other
  modified_base (18)..(18): a, c, g, t, unknown or other
ggnggnggnaayggnggnaay

SEQ ID NO: 3915 - DNA, 21 bp, Artificial Sequence
  Description of Artificial Sequence: Synthetic oligonucleotide
  modified_base (3)..(3): a, c, g, t, unknown or other
  modified_base (6)..(6): a, c, g, t, unknown or other
  modified_base (9)..(9): a, c, g, t, unknown or other
  modified_base (12)..(12): a, c, g, t, unknown or other
  modified_base (21)..(21): a, c, g, t, unknown or other
ggnggnggnggnaayaayggn

SEQ ID NO: 3916 - DNA, 21 bp, Artificial Sequence
  Description of Artificial Sequence: Synthetic oligonucleotide
  modified_base (3)..(3): a, c, g, t, unknown or other
  modified_base (6)..(6): a, c, g, t, unknown or other
  modified_base (9)..(9): a, c, g, t, unknown or other
  modified_base (12)..(12): a, c, g, t, unknown or other
  modified_base (18)..(18): a, c, g, t, unknown or other
ggnggnggnggnaayggnaay

SEQ ID NO: 3917 - DNA, 21 bp, Artificial Sequence
  Description of Artificial Sequence: Synthetic oligonucleotide
  modified_base (3)..(3): a, c, g, t, unknown or other
  modified_base (6)..(6): a, c, g, t, unknown or other
  modified_base (9)..(9): a, c, g, t, unknown or other
  modified_base (12)..(12): a, c, g, t, unknown or other
  modified_base (15)..(15): a, c, g, t, unknown or other
  modified_base (18)..(18): a, c, g, t, unknown or other
ggnggnggnggnggnggnaay

SEQ ID NO: 3918 - DNA, 21 bp, Artificial Sequence
  Description of Artificial Sequence: Synthetic oligonucleotide
  modified_base (6)..(6): a, c, g, t, unknown or other
  modified_base (9)..(9): a, c, g, t, unknown or other
  modified_base (12)..(12): a, c, g, t, unknown or other
  modified_base (15)..(15): a, c, g, t, unknown or other
  modified_base (18)..(18): a, c, g, t, unknown or other
  modified_base (21)..(21): a, c, g, t, unknown or other
aayggnggnggnggnggnggn

SEQ ID NO: 3919 - DNA, 21 bp, Artificial Sequence
  Description of Artificial Sequence: Synthetic oligonucleotide
  modified_base (3)..(3): a, c, g, t, unknown or other
  modified_base (9)..(9): a, c, g, t, unknown or other
  modified_base (12)..(12): a, c, g, t, unknown or other
  modified_base (15)..(15): a, c, g, t, unknown or other
  modified_base (18)..(18): a, c, g, t, unknown or other
  modified_base (21)..(21): a, c, g, t, unknown or other
ggnaayggnggnggnggnggn

SEQ ID NO: 3920 - DNA, 21 bp, Artificial Sequence
  Description of Artificial Sequence: Synthetic oligonucleotide
  modified_base (3)..(3): a, c, g, t, unknown or other
  modified_base (6)..(6): a, c, g, t, unknown or other
  modified_base (12)..(12): a, c, g, t, unknown or other
  modified_base (15)..(15): a, c, g, t, unknown or other
  modified_base (18)..(18): a, c, g, t, unknown or other
  modified_base (21)..(21): a, c, g, t, unknown or other
ggnggnaayggnggnggnggn

SEQ ID NO: 3921 - DNA, 21 bp, Artificial Sequence
  Description of Artificial Sequence: Synthetic oligonucleotide
  modified_base (3)..(3): a, c, g, t, unknown or other
  modified_base (6)..(6): a, c, g, t, unknown or other
  modified_base (9)..(9): a, c, g, t, unknown or other
  modified_base (15)..(15): a, c, g, t, unknown or other
  modified_base (18)..(18): a, c, g, t, unknown or other
  modified_base (21)..(21): a, c, g, t, unknown or other
ggnggnggnaayggnggnggn

SEQ ID NO: 3922 - DNA, 21 bp, Artificial Sequence
  Description of Artificial Sequence: Synthetic oligonucleotide
  modified_base (3)..(3): a, c, g, t, unknown or other
  modified_base (6)..(6): a, c, g, t, unknown or other
  modified_base (9)..(9): a, c, g, t, unknown or other
  modified_base (12)..(12): a, c, g, t, unknown or other
  modified_base (18)..(18): a, c, g, t, unknown or other
  modified_base (21)..(21): a, c, g, t, unknown or other
ggnggnggnggnaayggnggn

SEQ ID NO: 3923 - DNA, 21 bp, Artificial Sequence
  Description of Artificial Sequence: Synthetic oligonucleotide
  modified_base (3)..(3): a, c, g, t, unknown or other
  modified_base (6)..(6): a, c, g, t, unknown or other
  modified_base (9)..(9): a, c, g, t, unknown or other
  modified_base (12)..(12): a, c, g, t, unknown or other
  modified_base (15)..(15): a, c, g, t, unknown or other
  modified_base (21)..(21): a, c, g, t, unknown or other
ggnggnggnggnggnaayggn

SEQ ID NO: 3924 - DNA, 12 bp, Artificial Sequence
  Description of Artificial Sequence: Synthetic oligonucleotide
  modified_base (3)..(3): a, c, g, t, unknown or other
  modified_base (6)..(6): a, c, g, t, unknown or other
  modified_base (9)..(9): a, c, g, t, unknown or other
ggnggnggngay

SEQ ID NO: 3925 - DNA, 12 bp, Artificial Sequence
  Description of Artificial Sequence: Synthetic oligonucleotide
  modified_base (6)..(6): a, c, g, t, unknown or other
  modified_base (9)..(9): a, c, g, t, unknown or other
  modified_base (12)..(12): a, c, g, t, unknown or other
gayggnggnggn

SEQ ID NO: 3926 - DNA, 12 bp, Artificial Sequence
  Description of Artificial Sequence: Synthetic oligonucleotide
  modified_base (3)..(3): a, c, g, t, unknown or other
  modified_base (9)..(9): a, c, g, t, unknown or other
  modified_base (12)..(12): a, c, g, t, unknown or other
ggngayggnggn

SEQ ID NO: 3927 - DNA, 12 bp, Artificial Sequence
  Description of Artificial Sequence: Synthetic oligonucleotide
  modified_base (3)..(3): a, c, g, t, unknown or other
  modified_base (6)..(6): a, c, g, t, unknown or other
  modified_base (12)..(12): a, c, g, t, unknown or other
ggnggngayggn

SEQ ID NO: 3928 - DNA, 15 bp, Artificial Sequence
  Description of Artificial Sequence: Synthetic oligonucleotide
  modified_base (3)..(3): a, c, g, t, unknown or other
  modified_base (6)..(6): a, c, g, t, unknown or other
  modified_base (9)..(9): a, c, g, t, unknown or other
  modified_base (12)..(12): a, c, g, t, unknown or other
ggnggnggnggngay

SEQ ID NO: 3929 - DNA, 15 bp, Artificial Sequence
  Description of Artificial Sequence: Synthetic oligonucleotide
  modified_base (6)..(6): a, c, g, t, unknown or other
  modified_base (9)..(9): a, c, g, t, unknown or other
  modified_base (12)..(12): a, c, g, t, unknown or other
  modified_base (15)..(15): a, c, g, t, unknown or other
gayggnggnggnggn

SEQ ID NO: 3930 - DNA, 15 bp, Artificial Sequence
  Description of Artificial Sequence: Synthetic oligonucleotide
  modified_base (3)..(3): a, c, g, t, unknown or other
  modified_base (9)..(9): a, c, g, t, unknown or other
  modified_base (12)..(12): a, c, g, t, unknown or other
  modified_base (15)..(15): a, c, g, t, unknown or other
ggngayggnggnggn

SEQ ID NO: 3931 - DNA, 15 bp, Artificial Sequence
  Description of Artificial Sequence: Synthetic oligonucleotide
  modified_base (3)..(3): a, c, g, t, unknown or other
  modified_base (6)..(6): a, c, g, t, unknown or other
  modified_base (12)..(12): a, c, g, t, unknown or other
  modified_base (15)..(15): a, c, g, t, unknown or other
ggnggngayggnggn

SEQ ID NO: 3932 - DNA, 15 bp, Artificial Sequence
  Description of Artificial Sequence: Synthetic oligonucleotide
  modified_base (3)..(3): a, c, g, t, unknown or other
  modified_base (6)..(6): a, c, g, t, unknown or other
  modified_base (9)..(9): a, c, g, t, unknown or other
  modified_base (15)..(15): a, c, g, t, unknown or other
ggnggnggngayggn

SEQ ID NO: 3933 - DNA, 15 bp, Artificial Sequence
  Description of Artificial Sequence: Synthetic oligonucleotide
  modified_base (3)..(3): a, c, g, t, unknown or other
  modified_base (6)..(6): a, c, g, t, unknown or other
  modified_base (9)..(9): a, c, g, t, unknown or other
ggnggnggngaygay

SEQ ID NO: 3934 - DNA, 15 bp, Artificial Sequence
  Description of Artificial Sequence: Synthetic oligonucleotide
  modified_base (9)..(9): a, c, g, t, unknown or other
  modified_base (12)..(12): a, c, g, t, unknown or other
  modified_base (15)..(15): a, c, g, t, unknown or other
gaygayggnggnggn

SEQ ID NO: 3935 - DNA, 15 bp, Artificial Sequence
  Description of Artificial Sequence: Synthetic oligonucleotide
  modified_base (6)..(6): a, c, g, t, unknown or other
  modified_base (12)..(12): a, c, g, t, unknown or other
  modified_base (15)..(15): a, c, g, t, unknown or other
gayggngayggnggn

SEQ ID NO: 3936 - DNA, 15 bp, Artificial Sequence
  Description of Artificial Sequence: Synthetic oligonucleotide
  modified_base (6)..(6): a, c, g, t, unknown or other
  modified_base (9)..(9): a, c, g, t, unknown or other
  modified_base (15)..(15): a, c, g, t, unknown or other
gayggnggngayggn

SEQ ID NO: 3937 - DNA, 15 bp, Artificial Sequence
  Description of Artificial Sequence: Synthetic oligonucleotide
  modified_base (6)..(6): a, c, g, t, unknown or other
  modified_base (9)..(9): a, c, g, t, unknown or other
  modified_base (12)..(12): a, c, g, t, unknown or other
gayggnggnggngay

SEQ ID NO: 3938 - DNA, 15 bp, Artificial Sequence
  Description of Artificial Sequence: Synthetic oligonucleotide
  modified_base (3)..(3): a, c, g, t, unknown or other
  modified_base (12)..(12): a, c, g, t, unknown or other
  modified_base (15)..(15): a, c, g, t, unknown or other
ggngaygayggnggn

SEQ ID NO: 3939 - DNA, 15 bp, Artificial Sequence
  Description of Artificial Sequence: Synthetic oligonucleotide
  modified_base (3)..(3): a, c, g, t, unknown or other
  modified_base (9)..(9): a, c, g, t, unknown or other
  modified_base (15)..(15): a, c, g, t, unknown or other
ggngayggngayggn

SEQ ID NO: 3940 - DNA, 15 bp, Artificial Sequence
  Description of Artificial Sequence: Synthetic oligonucleotide
  modified_base (3)..(3): a, c, g, t, unknown or other
  modified_base (9)..(9): a, c, g, t, unknown or other
  modified_base (12)..(12): a, c, g, t, unknown or other
ggngayggnggngay

SEQ ID NO: 3941 - DNA, 15 bp, Artificial Sequence
  Description of Artificial Sequence: Synthetic oligonucleotide
  modified_base (3)..(3): a, c, g, t, unknown or other
  modified_base (6)..(6): a, c, g, t, unknown or other
  modified_base (15)..(15): a, c, g, t, unknown or other
ggnggngaygayggn

SEQ ID NO: 3942 - DNA, 15 bp, Artificial Sequence
  Description of Artificial Sequence: Synthetic oligonucleotide
  modified_base (3)..(3): a, c, g, t, unknown or other
  modified_base (6)..(6): a, c, g, t, unknown or other
  modified_base (12)..(12): a, c, g, t, unknown or other
ggnggngayggngay

SEQ ID NO: 3943 - DNA, 18 bp, Artificial Sequence
  Description of Artificial Sequence: Synthetic oligonucleotide
  modified_base (3)..(3): a, c, g, t, unknown or other
  modified_base (6)..(6): a, c, g, t, unknown or other
  modified_base (9)..(9): a, c, g, t, unknown or other
  modified_base (12)..(12): a, c, g, t, unknown or other
  modified_base (15)..(15): a, c, g, t, unknown or other
ggnggnggnggnggngay

SEQ ID NO: 3944 - DNA, 18 bp, Artificial Sequence
  Description of Artificial Sequence: Synthetic oligonucleotide
  modified_base (6)..(6): a, c, g, t, unknown or other
  modified_base (9)..(9): a, c, g, t, unknown or other
  modified_base (12)..(12): a, c, g, t, unknown or other
  modified_base (15)..(15): a, c, g, t, unknown or other
  modified_base (18)..(18): a, c, g, t, unknown or other
gayggnggnggnggnggn

SEQ ID NO: 3945 - DNA, 18 bp, Artificial Sequence
  Description of Artificial Sequence: Synthetic oligonucleotide
  modified_base (3)..(3): a, c, g, t, unknown or other
  modified_base (9)..(9): a, c, g, t, unknown or other
  modified_base (12)..(12): a, c, g, t, unknown or other
  modified_base (15)..(15): a, c, g, t, unknown or other
  modified_base (18)..(18): a, c, g, t, unknown or other
ggngayggnggnggnggn

SEQ ID NO: 3946 - DNA, 18 bp, Artificial Sequence
  Description of Artificial Sequence: Synthetic oligonucleotide
  modified_base (3)..(3): a, c, g, t, unknown or other
  modified_base (6)..(6): a, c, g, t, unknown or other
  modified_base (12)..(12): a, c, g, t, unknown or other
  modified_base (15)..(15): a, c, g, t, unknown or other
  modified_base (18)..(18): a, c, g, t, unknown or other
ggnggngayggnggnggn

SEQ ID NO: 3947 - DNA, 18 bp, Artificial Sequence
  Description of Artificial Sequence: Synthetic oligonucleotide
  modified_base (3)..(3): a, c, g, t, unknown or other
  modified_base (6)..(6): a, c, g, t, unknown or other
  modified_base (9)..(9): a, c, g, t, unknown or other
  modified_base (15)..(15): a, c, g, t, unknown or other
  modified_base (18)..(18): a, c, g, t, unknown or other
ggnggnggngayggnggn

SEQ ID NO: 3948 - DNA, 18 bp, Artificial Sequence
  Description of Artificial Sequence: Synthetic oligonucleotide
  modified_base (3)..(3): a, c, g, t, unknown or other
  modified_base (6)..(6): a, c, g, t, unknown or other
  modified_base (9)..(9): a, c, g, t, unknown or other
  modified_base (12)..(12): a, c, g, t, unknown or other
  modified_base (18)..(18): a, c, g, t, unknown or other
ggnggnggnggngayggn

SEQ ID NO: 3949 - DNA, 18 bp, Artificial Sequence
  Description of Artificial Sequence: Synthetic oligonucleotide
  modified_base (3)..(3): a, c, g, t, unknown or other
  modified_base (6)..(6): a, c, g, t, unknown or other
  modified_base (9)..(9): a, c, g, t, unknown or other
  modified_base (12)..(12): a, c, g, t, unknown or other
ggnggnggnggngaygay

SEQ ID NO: 3950 - DNA, 18 bp, Artificial Sequence
  Description of Artificial Sequence: Synthetic oligonucleotide
  modified_base (9)..(9): a, c, g, t, unknown or other
  modified_base (12)..(12): a, c, g, t, unknown or other
  modified_base (15)..(15): a, c, g, t, unknown or other
  modified_base (18)..(18): a, c, g, t, unknown or other
gaygayggnggnggnggn

SEQ ID NO: 3951 - DNA, 18 bp, Artificial Sequence
  Description of Artificial Sequence: Synthetic oligonucleotide
  modified_base (6)..(6): a, c, g, t, unknown or other
  modified_base (12)..(12): a, c, g, t, unknown or other
  modified_base (15)..(15): a, c, g, t, unknown or other
  modified_base (18)..(18): a, c, g, t, unknown or other
gayggngayggnggnggn

SEQ ID NO: 3952 - DNA, 18 bp, Artificial Sequence
  Description of Artificial Sequence: Synthetic oligonucleotide
  modified_base (6)..(6): a, c, g, t, unknown or other
  modified_base (9)..(9): a, c, g, t, unknown or other
  modified_base (15)..(15): a, c, g, t, unknown or other
  modified_base (18)..(18): a, c, g, t, unknown or other
gayggnggngayggnggn

SEQ ID NO: 3953 - DNA, 18 bp, Artificial Sequence
  Description of Artificial Sequence: Synthetic oligonucleotide
  modified_base (6)..(6): a, c, g, t, unknown or other
  modified_base (9)..(9): a, c, g, t, unknown or other
  modified_base (12)..(12): a, c, g, t, unknown or other
  modified_base (18)..(18): a, c, g, t, unknown or other
gayggnggnggngayggn

SEQ ID NO: 3954 - DNA, 18 bp, Artificial Sequence
  Description of Artificial Sequence: Synthetic oligonucleotide
  modified_base (6)..(6): a, c, g, t, unknown or other
  modified_base (9)..(9): a, c, g, t, unknown or other
  modified_base (12)..(12): a, c, g, t, unknown or other
  modified_base (15)..(15): a, c, g, t, unknown or other
gayggnggnggnggngay

SEQ ID NO: 3955 - DNA, 18 bp, Artificial Sequence
  Description of Artificial Sequence: Synthetic oligonucleotide
  modified_base (3)..(3): a, c, g, t, unknown or other
  modified_base (12)..(12): a, c, g, t, unknown or other
  modified_base (15)..(15): a, c, g, t, unknown or other
  modified_base (18)..(18): a, c, g, t, unknown or other
ggngaygayggnggnggn

SEQ ID NO: 3956 - DNA, 18 bp, Artificial Sequence
  Description of Artificial Sequence: Synthetic oligonucleotide
  modified_base (3)..(3): a, c, g, t, unknown or other
  modified_base (9)..(9): a, c, g, t, unknown or other
  modified_base (15)..(15): a, c, g, t, unknown or other
  modified_base (18)..(18): a, c, g, t, unknown or other
ggngayggngayggnggn

SEQ ID NO: 3957 - DNA, 18 bp, Artificial Sequence
  Description of Artificial Sequence: Synthetic oligonucleotide
  modified_base (3)..(3): a, c, g, t, unknown or other
  modified_base (9)..(9): a, c, g, t, unknown or other
  modified_base (12)..(12): a, c, g, t, unknown or other
  modified_base (18)..(18): a, c, g, t, unknown or other
ggngayggnggngayggn

SEQ ID NO: 3958 - DNA, 18 bp, Artificial Sequence
  Description of Artificial Sequence: Synthetic oligonucleotide
  modified_base (3)..(3): a, c, g, t, unknown or other
  modified_base (9)..(9): a, c, g, t, unknown or other
  modified_base (12)..(12): a, c, g, t, unknown or other
  modified_base (15)..(15): a, c, g, t, unknown or other
ggngayggnggnggngay

SEQ ID NO: 3959 - DNA, 18 bp, Artificial Sequence
  Description of Artificial Sequence: Synthetic oligonucleotide
  modified_base (3)..(3): a, c, g, t, unknown or other
  modified_base (6)..(6): a, c, g, t, unknown or other
  modified_base (15)..(15): a, c, g, t, unknown or other
  modified_base (18)..(18): a, c, g, t, unknown or other
ggnggngaygayggnggn

SEQ ID NO: 3960 - DNA, 18 bp, Artificial Sequence
  Description of Artificial Sequence: Synthetic oligonucleotide
  modified_base (3)..(3): a, c, g, t, unknown or other
  modified_base (6)..(6): a, c, g, t, unknown or other
  modified_base (12)..(12): a, c, g, t, unknown or other
  modified_base (18)..(18): a, c, g, t, unknown or other
ggnggngayggngayggn

SEQ ID NO: 3961 - DNA, 18 bp, Artificial Sequence
  Description of Artificial Sequence: Synthetic oligonucleotide
  modified_base (3)..(3): a, c, g, t, unknown or other
  modified_base (6)..(6): a, c, g, t, unknown or other
  modified_base (12)..(12): a, c, g, t, unknown or other
  modified_base (15)..(15): a, c, g, t, unknown or other
ggnggngayggnggngay

SEQ ID NO: 3962 - DNA, 18 bp, Artificial Sequence
  Description of Artificial Sequence: Synthetic oligonucleotide
  modified_base (3)..(3): a, c, g, t, unknown or other
  modified_base (6)..(6): a, c, g, t, unknown or other
  modified_base (9)..(9): a, c, g, t, unknown or other
  modified_base (18)..(18): a, c, g, t, unknown or other
ggnggnggngaygayggn

SEQ ID NO: 3963 - DNA, 18 bp, Artificial Sequence
  Description of Artificial Sequence: Synthetic oligonucleotide
  modified_base (3)..(3): a, c, g, t, unknown or other
  modified_base (6)..(6): a, c, g, t, unknown or other
  modified_base (9)..(9): a, c, g, t, unknown or other
  modified_base (15)..(15): a, c, g, t, unknown or other
ggnggnggngayggngay

SEQ ID NO: 3964 - DNA, 21 bp, Artificial Sequence
  Description of Artificial Sequence: Synthetic oligonucleotide
  modified_base (3)..(3): a, c, g, t, unknown or other
  modified_base (6)..(6): a, c, g, t, unknown or other
  modified_base (9)..(9): a, c, g, t, unknown or other
  modified_base (12)..(12): a, c, g, t, unknown or other
ggnggnggnggngaygaygay

SEQ ID NO: 3965 - DNA, 21 bp, Artificial Sequence
  Description of Artificial Sequence: Synthetic oligonucleotide
  modified_base (12)..(12): a, c, g, t, unknown or other
  modified_base (15)..(15): a, c, g, t, unknown or other
  modified_base (18)..(18): a, c, g, t, unknown or other
  modified_base (21)..(21): a, c, g, t, unknown or other
gaygaygayggnggnggnggn

SEQ ID NO: 3966 - DNA, 21 bp, Artificial Sequence
  Description of Artificial Sequence: Synthetic oligonucleotide
  modified_base (6)..(6): a, c, g, t, unknown or other
  modified_base (15)..(15): a, c, g, t, unknown or other
  modified_base (18)..(18): a, c, g, t, unknown or other
  modified_base (21)..(21): a, c, g, t, unknown or other
gayggngaygayggnggnggn

SEQ ID NO: 3967 - DNA, 21 bp, Artificial Sequence
  Description of Artificial Sequence: Synthetic oligonucleotide
  modified_base (6)..(6): a, c, g, t, unknown or other
  modified_base (12)..(12): a, c, g, t, unknown or other
  modified_base (18)..(18): a, c, g, t, unknown or other
  modified_base (21)..(21): a, c, g, t, unknown or other
gayggngayggngayggnggn

SEQ ID NO: 3968 - DNA, 21 bp, Artificial Sequence
  Description of Artificial Sequence: Synthetic oligonucleotide
  modified_base (6)..(6): a, c, g, t, unknown or other
  modified_base (12)..(12): a, c, g, t, unknown or other
  modified_base (15)..(15): a, c, g, t, unknown or other
  modified_base (21)..(21): a, c, g, t, unknown or other
gayggngayggnggngayggn

SEQ ID NO: 3969 - DNA, 21 bp, Artificial Sequence
  Description of Artificial Sequence: Synthetic oligonucleotide
  modified_base (6)..(6): a, c, g, t, unknown or other
  modified_base (12)..(12): a, c, g, t, unknown or other
  modified_base (15)..(15): a, c, g, t, unknown or other
  modified_base (18)..(18): a, c, g, t, unknown or other
gayggngayggnggnggngay

SEQ ID NO: 3970 - DNA, 21 bp, Artificial Sequence
  Description of Artificial Sequence: Synthetic oligonucleotide
  modified_base (6)..(6): a, c, g, t, unknown or other
  modified_base (9)..(9): a, c, g, t, unknown or other
  modified_base (18)..(18): a, c, g, t, unknown or other
  modified_base (21)..(21): a, c, g, t, unknown or other
gayggnggngaygayggnggn

SEQ ID NO: 3971 - DNA, 21 bp, Artificial Sequence
  Description of Artificial Sequence: Synthetic oligonucleotide
  modified_base (6)..(6): a, c, g, t, unknown or other
  modified_base (9)..(9): a, c, g, t, unknown or other
  modified_base (15)..(15): a, c, g, t, unknown or other
  modified_base (21)..(21): a, c, g, t, unknown or other
gayggnggngayggngayggn

SEQ ID NO: 3972 - DNA, 21 bp, Artificial Sequence
  Description of Artificial Sequence: Synthetic oligonucleotide
  modified_base (6)..(6): a, c, g, t, unknown or other
  modified_base (9)..(9): a, c, g, t, unknown or other
  modified_base (15)..(15): a, c, g, t, unknown or other
  modified_base (18)..(18): a, c, g, t, unknown or other
gayggnggngayggnggngay

SEQ ID NO: 3973 - DNA, 21 bp, Artificial Sequence
  Description of Artificial Sequence: Synthetic oligonucleotide
  modified_base (6)..(6): a, c, g, t, unknown or other
  modified_base (9)..(9): a, c, g, t, unknown or other
  modified_base (12)..(12): a, c, g, t, unknown or other
  modified_base (18)..(18): a, c, g, t, unknown or other
gayggnggnggngayggngay

SEQ ID NO: 3974 - DNA, 21 bp, Artificial Sequence
  Description of Artificial Sequence: Synthetic oligonucleotide
  modified_base (6)..(6): a, c, g, t, unknown or other
  modified_base (9)..(9): a, c, g, t, unknown or other
  modified_base (12)..(12): a, c, g, t, unknown or other
  modified_base (21)..(21): a, c, g, t, unknown or other
gayggnggnggngaygayggn

SEQ ID NO: 3975 - DNA, 21 bp, Artificial Sequence
  Description of Artificial Sequence: Synthetic oligonucleotide
  modified_base (6)..(6): a, c, g, t, unknown or other
  modified_base (9)..(9): a, c, g, t, unknown or other
  modified_base (12)..(12): a, c, g, t, unknown or other
  modified_base (15)..(15): a, c, g, t, unknown or other
gayggnggnggnggngaygay

SEQ ID NO: 3976 - DNA, 21 bp, Artificial Sequence
  Description of Artificial Sequence: Synthetic oligonucleotide
  modified_base (9)..(9): a, c, g, t, unknown or other
  modified_base (15)..(15): a, c, g, t, unknown or other
  modified_base (18)..(18): a, c, g, t, unknown or other
  modified_base (21)..(21): a, c, g, t, unknown or other
gaygayggngayggnggnggn

SEQ ID NO: 3977 - DNA, 21 bp, Artificial Sequence
  Description of Artificial Sequence: Synthetic oligonucleotide
  modified_base (9)..(9): a, c, g, t, unknown or other
  modified_base (12)..(12): a, c, g, t, unknown or other
  modified_base (18)..(18): a, c, g, t, unknown or other
  modified_base (21)..(21): a, c, g, t, unknown or other
gaygayggnggngayggnggn

SEQ ID NO: 3978 - DNA, 21 bp, Artificial Sequence
  Description of Artificial Sequence: Synthetic oligonucleotide
  modified_base (9)..(9): a, c, g, t, unknown or other
  modified_base (12)..(12): a, c, g, t, unknown or other
  modified_base (15)..(15): a, c, g, t, unknown or other
  modified_base (21)..(21): a, c, g, t, unknown or other
gaygayggnggnggngayggn

SEQ ID NO: 3979 - DNA, 21 bp, Artificial Sequence
  Description of Artificial Sequence: Synthetic oligonucleotide
  modified_base (9)..(9): a, c, g, t, unknown or other
  modified_base (12)..(12): a, c, g, t, unknown or other
  modified_base (15)..(15): a, c, g, t, unknown or other
  modified_base (18)..(18): a, c, g, t, unknown or other
gaygayggnggnggnggngay

SEQ ID NO: 3980 - DNA, 21 bp, Artificial Sequence
  Description of Artificial Sequence: Synthetic oligonucleotide
  modified_base (3)..(3): a, c, g, t, unknown or other
  modified_base (15)..(15): a, c, g, t, unknown or other
  modified_base (18)..(18): a, c, g, t, unknown or other
  modified_base (21)..(21): a, c, g, t, unknown or other
ggngaygaygayggnggnggn

SEQ ID NO: 3981 - DNA, 21 bp, Artificial Sequence
  Description of Artificial Sequence: Synthetic oligonucleotide
  modified_base (3)..(3): a, c, g, t, unknown or other
  modified_base (12)..(12): a, c, g, t, unknown or other
  modified_base (18)..(18): a, c, g, t, unknown or other
  modified_base (21)..(21): a, c, g, t, unknown or other
ggngaygayggngayggnggn

SEQ ID NO: 3982 - DNA, 21 bp, Artificial Sequence
  Description of Artificial Sequence: Synthetic oligonucleotide
  modified_base (3)..(3): a, c, g, t, unknown or other
  modified_base (12)..(12): a, c, g, t, unknown or other
  modified_base (15)..(15): a, c, g, t, unknown or other
  modified_base (21)..(21): a, c, g, t, unknown or other
ggngaygayggnggngayggn

SEQ ID NO: 3983 - DNA, 21 bp, Artificial Sequence
  Description of Artificial Sequence: Synthetic oligonucleotide
  modified_base (3)..(3): a, c, g, t, unknown or other
  modified_base (12)..(12): a, c, g, t, unknown or other
  modified_base (15)..(15): a, c, g, t, unknown or other
  modified_base (18)..(18): a, c, g, t, unknown or other
ggngaygayggnggnggngay

SEQ ID NO: 3984 - DNA, 21 bp, Artificial Sequence
  Description of Artificial Sequence: Synthetic oligonucleotide
  modified_base (3)..(3): a, c, g, t, unknown or other
  modified_base (9)..(9): a, c, g, t, unknown or other
  modified_base (18)..(18): a, c, g, t, unknown or other
  modified_base (21)..(21): a, c, g, t, unknown or other
ggngayggngaygayggnggn

SEQ ID NO: 3985 - DNA, 21 bp, Artificial Sequence
  Description of Artificial Sequence: Synthetic oligonucleotide
  modified_base (3)..(3): a, c, g, t, unknown or other
  modified_base (9)..(9): a, c, g, t, unknown or other
  modified_base (12)..(12): a, c, g, t, unknown or other
  modified_base (21)..(21): a, c, g, t, unknown or other
ggngayggnggngaygayggn

SEQ ID NO: 3986 - DNA, 21 bp, Artificial Sequence
  Description of Artificial Sequence: Synthetic oligonucleotide
  modified_base (3)..(3): a, c, g, t, unknown or other
  modified_base (9)..(9): a, c, g, t, unknown or other
  modified_base (12)..(12): a, c, g, t, unknown or other
  modified_base (15)..(15): a, c, g, t, unknown or other
ggngayggnggnggngaygay

SEQ ID NO: 3987 - DNA, 21 bp, Artificial Sequence
  Description of Artificial Sequence: Synthetic oligonucleotide
  modified_base (3)..(3): a, c, g, t, unknown or other
  modified_base (9)..(9): a, c, g, t, unknown or other
  modified_base (15)..(15): a, c, g, t, unknown or other
  modified_base (21)..(21): a, c, g, t, unknown or other
ggngayggngayggngayggn

SEQ ID NO: 3988 - DNA, 21 bp, Artificial Sequence
  Description of Artificial Sequence: Synthetic oligonucleotide
  modified_base (3)..(3): a, c, g, t, unknown or other
  modified_base (9)..(9): a, c, g, t, unknown or other
  modified_base (15)..(15): a, c, g, t, unknown or other
  modified_base (18)..(18): a, c, g, t, unknown or other
ggngayggngayggnggngay

SEQ ID NO: 3989 - DNA, 21 bp, Artificial Sequence
  Description of Artificial Sequence: Synthetic oligonucleotide
  modified_base (3)..(3): a, c, g, t, unknown or other
  modified_base (9)..(9): a, c, g, t, unknown or other
  modified_base (12)..(12): a, c, g, t, unknown or other
  modified_base (18)..(18): a, c, g, t, unknown or other
ggngayggnggngayggngay

SEQ ID NO: 3990 - DNA, 21 bp, Artificial Sequence
  Description of Artificial Sequence: Synthetic oligonucleotide
  modified_base (3)..(3): a, c, g, t, unknown or other
  modified_base (6)..(6): a, c, g, t, unknown or other
  modified_base (18)..(18): a, c, g, t, unknown or other
  modified_base (21)..(21): a, c, g, t, unknown or other
ggnggngaygaygayggnggn

SEQ ID NO: 3991 - DNA, 21 bp, Artificial Sequence
  Description of Artificial Sequence: Synthetic oligonucleotide
  modified_base (3)..(3): a, c, g, t, unknown or other
  modified_base (6)..(6): a, c, g, t, unknown or other
  modified_base (15)..(15): a, c, g, t, unknown or other
  modified_base (21)..(21): a, c, g, t, unknown or other
ggnggngaygayggngayggn

SEQ ID NO: 3992 - DNA, 21 bp, Artificial Sequence
  Description of Artificial Sequence: Synthetic oligonucleotide
  modified_base (3)..(3): a, c, g, t, unknown or other
  modified_base (6)..(6): a, c, g, t, unknown or other
  modified_base (15)..(15): a, c, g, t, unknown or other
  modified_base (18)..(18): a, c, g, t, unknown or other
ggnggngaygayggnggngay

SEQ ID NO: 3993 - DNA, 21 bp, Artificial Sequence
  Description of Artificial Sequence: Synthetic oligonucleotide
  modified_base (3)..(3): a, c, g, t, unknown or other
  modified_base (6)..(6): a, c, g, t, unknown or other
  modified_base (12)..(12): a, c, g, t, unknown or other
  modified_base (21)..(21): a, c, g, t, unknown or other
ggnggngayggngaygayggn

SEQ ID NO: 3994 - DNA, 21 bp, Artificial Sequence
  Description of Artificial Sequence: Synthetic oligonucleotide
  modified_base (3)..(3): a, c, g, t, unknown or other
  modified_base (6)..(6): a, c, g, t, unknown or other
  modified_base (12)..(12): a, c, g, t, unknown or other
  modified_base (18)..(18): a, c, g, t, unknown or other
ggnggngayggngayggngay

SEQ ID NO: 3995 - DNA, 21 bp, Artificial Sequence
  Description of Artificial Sequence: Synthetic oligonucleotide
  modified_base (3)..(3): a, c, g, t, unknown or other
  modified_base (6)..(6): a, c, g, t, unknown or other
  modified_base (12)..(12): a, c, g, t, unknown or other
  modified_base (15)..(15): a, c, g, t, unknown or other
ggnggngayggnggngaygay

SEQ ID NO: 3996 - DNA, 21 bp, Artificial Sequence
  Description of Artificial Sequence: Synthetic oligonucleotide
  modified_base (3)..(3): a, c, g, t, unknown or other
  modified_base (6)..(6): a, c, g, t, unknown or other
  modified_base (9)..(9): a, c, g, t, unknown or other
  modified_base (21)..(21): a, c, g, t, unknown or other
ggnggnggngaygaygayggn

SEQ ID NO: 3997 - DNA, 21 bp, Artificial Sequence
  Description of Artificial Sequence: Synthetic oligonucleotide
  modified_base (3)..(3): a, c, g, t, unknown or other
  modified_base (6)..(6): a, c, g, t, unknown or other
  modified_base (9)..(9): a, c, g, t, unknown or other
  modified_base (18)..(18): a, c, g, t, unknown or other
ggnggnggngaygayggngay

SEQ ID NO: 3998 - DNA, 21 bp, Artificial Sequence
  Description of Artificial Sequence: Synthetic oligonucleotide
  modified_base (3)..(3): a, c, g, t, unknown or other
  modified_base (6)..(6): a, c, g, t, unknown or other
  modified_base (9)..(9): a, c, g, t, unknown or other
  modified_base (15)..(15): a, c, g, t, unknown or other
ggnggnggngayggngaygay

SEQ ID NO: 3999 - DNA, 21 bp, Artificial Sequence
  Description of Artificial Sequence: Synthetic oligonucleotide
  modified_base (3)..(3): a, c, g, t, unknown or other
  modified_base (6)..(6): a, c, g, t, unknown or other
  modified_base (9)..(9): a, c, g, t, unknown or other
  modified_base (12)..(12): a, c, g, t, unknown or other
  modified_base (15)..(15): a, c, g, t, unknown or other
ggnggnggnggnggngaygay

SEQ ID NO: 4000 - DNA, 21 bp, Artificial Sequence
  Description of Artificial Sequence: Synthetic oligonucleotide
  modified_base (9)..(9): a, c, g, t, unknown or other
  modified_base (12)..(12): a, c, g, t, unknown or other
  modified_base (15)..(15): a, c, g, t, unknown or other
  modified_base (18)..(18): a, c, g, t, unknown or other
  modified_base (21)..(21): a, c, g, t, unknown or other
gaygayggnggnggnggnggn

SEQ ID NO: 4001 - DNA, 21 bp, Artificial Sequence
  Description of Artificial Sequence: Synthetic oligonucleotide
  modified_base (6)..(6): a, c, g, t, unknown or other
  modified_base (12)..(12): a, c, g, t, unknown or other
  modified_base (15)..(15): a, c, g, t, unknown or other
  modified_base (18)..(18): a, c, g, t, unknown or other
  modified_base (21)..(21): a, c, g, t, unknown or other
gayggngayggnggnggnggn

SEQ ID NO: 4002 - DNA, 21 bp, Artificial Sequence
  Description of Artificial Sequence: Synthetic oligonucleotide
  modified_base (6)..(6): a, c, g, t, unknown or other
  modified_base (9)..(9): a, c, g, t, unknown or other
  modified_base (15)..(15): a, c, g, t, unknown or other
  modified_base (18)..(18): a, c, g, t, unknown or other
  modified_base (21)..(21): a, c, g, t, unknown or other
gayggnggngayggnggnggn

SEQ ID NO: 4003 - DNA, 21 bp, Artificial Sequence
  Description of Artificial Sequence: Synthetic oligonucleotide
  modified_base (6)..(6): a, c, g, t, unknown or other
  modified_base (9)..(9): a, c, g, t, unknown or other
  modified_base (12)..(12): a, c, g, t, unknown or other
  modified_base (18)..(18): a, c, g, t, unknown or other
  modified_base (21)..(21): a, c, g, t, unknown or other
gayggnggnggngayggnggn

SEQ ID NO: 4004 - DNA, 21 bp, Artificial Sequence
  Description of Artificial Sequence: Synthetic oligonucleotide
  modified_base (6)..(6): a, c, g, t, unknown or other
  modified_base (9)..(9): a, c, g, t, unknown or other
  modified_base (12)..(12): a, c, g, t, unknown or other
  modified_base (15)..(15): a, c, g, t, unknown or other
  modified_base (21)..(21): a, c, g, t, unknown or other
gayggnggnggnggngayggn

SEQ ID NO: 4005 - DNA, 21 bp, Artificial Sequence
  Description of Artificial Sequence: Synthetic oligonucleotide
  modified_base (6)..(6): a, c, g, t, unknown or other
  modified_base (9)..(9): a, c, g, t, unknown or other
  modified_base (12)..(12): a, c, g, t, unknown or other
  modified_base (15)..(15): a, c, g, t, unknown or other
  modified_base (18)..(18): a, c, g, t, unknown or other
gayggnggnggnggnggngay

SEQ ID NO: 4006 - DNA, 21 bp, Artificial Sequence
  Description of Artificial Sequence: Synthetic oligonucleotide
  modified_base (3)..(3): a, c, g, t, unknown or other
  modified_base (12)..(12): a, c, g, t, unknown or other
  modified_base (15)..(15): a, c, g, t, unknown or other
  modified_base (18)..(18): a, c, g, t, unknown or other
  modified_base (21)..(21): a, c, g, t, unknown or other
ggngaygayggnggnggnggn

SEQ ID NO: 4007 - DNA, 21 bp, Artificial Sequence
  Description of Artificial Sequence: Synthetic oligonucleotide
  modified_base (3)..(3): a, c, g, t, unknown or other
  modified_base (9)..(9): a, c, g, t, unknown or other
  modified_base (15)..(15): a, c, g, t, unknown or other
  modified_base (18)..(18): a, c, g, t, unknown or other
  modified_base (21)..(21): a, c, g, t, unknown or other
ggngayggngayggnggnggn

SEQ ID NO: 4008 - DNA, 21 bp, Artificial Sequence
  Description of Artificial Sequence: Synthetic oligonucleotide
  modified_base (3)..(3): a, c, g, t, unknown or other
  modified_base (9)..(9): a, c, g, t, unknown or other
  modified_base (12)..(12): a, c, g, t, unknown or other
  modified_base (18)..(18): a, c, g, t, unknown or other
  modified_base (21)..(21): a, c, g, t, unknown or other
ggngayggnggngayggnggn

SEQ ID NO: 4009 - DNA, 21 bp, Artificial Sequence
  Description of Artificial Sequence: Synthetic oligonucleotide
  modified_base (3)..(3): a, c, g, t, unknown or other
  modified_base (9)..(9): a, c, g, t, unknown or other
  modified_base (12)..(12): a, c, g, t, unknown or other
  modified_base (15)..(15): a, c, g, t, unknown or other
  modified_base (21)..(21): a, c, g, t, unknown or other
ggngayggnggnggngayggn

SEQ ID NO: 4010 - DNA, 21 bp, Artificial Sequence
  Description of Artificial Sequence: Synthetic oligonucleotide
  modified_base (3)..(3): a, c, g, t, unknown or other
  modified_base (9)..(9): a, c, g, t, unknown or other
  modified_base (12)..(12): a, c, g, t, unknown or other
  modified_base (15)..(15): a, c, g, t, unknown or other
  modified_base (18)..(18): a, c, g, t, unknown or other
ggngayggnggnggnggngay

SEQ ID NO: 4011 - DNA, 21 bp, Artificial Sequence
  Description of Artificial Sequence: Synthetic oligonucleotide
  modified_base (3)..(3): a, c, g, t, unknown or other
  modified_base (6)..(6): a, c, g, t, unknown or other
  modified_base (15)..(15): a, c, g, t, unknown or other
  modified_base (18)..(18): a, c, g, t, unknown or other
  modified_base (21)..(21): a, c, g, t, unknown or other
ggnggngaygayggnggnggn

SEQ ID NO: 4012 - DNA, 21 bp, Artificial Sequence
  Description of Artificial Sequence: Synthetic oligonucleotide
  modified_base (3)..(3): a, c, g, t, unknown or other
  modified_base (6)..(6): a, c, g, t, unknown or other
  modified_base (12)..(12): a, c, g, t, unknown or other
  modified_base (18)..(18): a, c, g, t, unknown or other
  modified_base (21)..(21): a, c, g, t, unknown or other
ggnggngayggngayggnggn

SEQ ID NO: 4013 - DNA, 21 bp, Artificial Sequence
  Description of Artificial Sequence: Synthetic oligonucleotide
  modified_base (3)..(3): a, c, g, t, unknown or other
  modified_base (6)..(6): a, c, g, t, unknown or other
  modified_base (12)..(12): a, c, g, t, unknown or other
  modified_base (15)..(15): a, c, g, t, unknown or other
  modified_base (21)..(21): a, c, g, t, unknown or other
ggnggngayggnggngayggn

SEQ ID NO: 4014 - DNA, 21 bp, Artificial Sequence
  Description of Artificial Sequence: Synthetic oligonucleotide
  modified_base (3)..(3): a, c, g, t, unknown or other
  modified_base (6)..(6): a, c, g, t, unknown or other
  modified_base (12)..(12): a, c, g, t, unknown or other
  modified_base (15)..(15): a, c, g, t, unknown or other
  modified_base (18)..(18): a, c, g, t, unknown or other
ggnggngayggnggnggngay

SEQ ID NO: 4015 - DNA, 21 bp, Artificial Sequence
  Description of Artificial Sequence: Synthetic oligonucleotide
  modified_base (3)..(3): a, c, g, t, unknown or other
  modified_base (6)..(6): a, c, g, t, unknown or other
  modified_base (9)..(9): a, c, g, t, unknown or other
  modified_base (18)..(18): a, c, g, t, unknown or other
  modified_base (21)..(21): a, c, g, t, unknown or other
ggnggnggngaygayggnggn

SEQ ID NO: 4016 - DNA, 21 bp, Artificial Sequence
  Description of Artificial Sequence: Synthetic oligonucleotide
  modified_base (3)..(3): a, c, g, t, unknown or other
  modified_base (6)..(6): a, c, g, t, unknown or other
  modified_base (9)..(9): a, c, g, t, unknown or other
  modified_base (15)..(15): a, c, g, t, unknown or other
  modified_base (21)..(21): a, c, g, t, unknown or other
ggnggnggngayggngayggn

SEQ ID NO: 4017 - DNA, 21 bp, Artificial Sequence
  Description of Artificial Sequence: Synthetic oligonucleotide
  modified_base (3)..(3): a, c, g, t, unknown or other
  modified_base (6)..(6): a, c, g, t, unknown or other
  modified_base (9)..(9): a, c, g, t, unknown or other
  modified_base (15)..(15): a, c, g, t, unknown or other
  modified_base (18)..(18): a, c, g, t, unknown or other
ggnggnggngayggnggngay

SEQ ID NO: 4018 - DNA, 21 bp, Artificial Sequence
  Description of Artificial Sequence: Synthetic oligonucleotide
  modified_base (3)..(3): a, c, g, t, unknown or other
  modified_base (6)..(6): a, c, g, t, unknown or other
  modified_base (9)..(9): a, c, g, t, unknown or other
  modified_base (12)..(12): a, c, g, t, unknown or other
  modified_base (21)..(21): a, c, g, t, unknown or other
ggnggnggnggngaygayggn

SEQ ID NO: 4019 - DNA, 21 bp, Artificial Sequence
  Description of Artificial Sequence: Synthetic oligonucleotide
  modified_base (3)..(3): a, c, g, t, unknown or other
  modified_base (6)..(6): a, c, g, t, unknown or other
  modified_base (9)..(9): a, c, g, t, unknown or other
  modified_base (12)..(12): a, c, g, t, unknown or other
  modified_base (18)..(18): a, c, g, t, unknown or other
ggnggnggnggngayggngay

SEQ ID NO: 4020 - DNA, 21 bp, Artificial Sequence
  Description of Artificial Sequence: Synthetic oligonucleotide
  modified_base (3)..(3): a, c, g, t, unknown or other
  modified_base (6)..(6): a, c, g, t, unknown or other
  modified_base (9)..(9): a, c, g, t, unknown or other
  modified_base (12)..(12): a, c, g, t, unknown or other
  modified_base (15)..(15): a, c, g, t, unknown or other
  modified_base (18)..(18): a, c, g, t, unknown or other
ggnggnggnggnggnggngay

SEQ ID NO: 4021 - DNA, 21 bp, Artificial Sequence
  Description of Artificial Sequence: Synthetic oligonucleotide
  modified_base (6)..(6): a, c, g, t, unknown or other
  modified_base (9)..(9): a, c, g, t, unknown or other
  modified_base (12)..(12): a, c, g, t, unknown or other
  modified_base (15)..(15): a, c, g, t, unknown or other
  modified_base (18)..(18): a, c, g, t, unknown or other
  modified_base (21)..(21): a, c, g, t, unknown or other
gayggnggnggnggnggnggn

SEQ ID NO: 4022 - DNA, 21 bp, Artificial Sequence
  Description of Artificial Sequence: Synthetic oligonucleotide
  modified_base (3)..(3): a, c, g, t, unknown or other
  modified_base (9)..(9): a, c, g, t, unknown or other
  modified_base (12)..(12): a, c, g, t, unknown or other
  modified_base (15)..(15): a, c, g, t, unknown or other
  modified_base (18)..(18): a, c, g, t, unknown or other
  modified_base (21)..(21): a, c, g, t, unknown or other
ggngayggnggnggnggnggn

SEQ ID NO: 4023 - DNA, 21 bp, Artificial Sequence
  Description of Artificial Sequence: Synthetic oligonucleotide
  modified_base (3)..(3): a, c, g, t, unknown or other
  modified_base (6)..(6): a, c, g, t, unknown or other
  modified_base (12)..(12): a, c, g, t, unknown or other
  modified_base (15)..(15): a, c, g, t, unknown or other
  modified_base (18)..(18): a, c, g, t, unknown or other
  modified_base (21)..(21): a, c, g, t, unknown or other
ggnggngayggnggnggnggn

SEQ ID NO: 4024 - DNA, 21 bp, Artificial Sequence
  Description of Artificial Sequence: Synthetic oligonucleotide
  modified_base (3)..(3): a, c, g, t, unknown or other
  modified_base (6)..(6): a, c, g, t, unknown or other
  modified_base (9)..(9): a, c, g, t, unknown or other
  modified_base (15)..(15): a, c, g, t, unknown or other
  modified_base (18)..(18): a, c, g, t, unknown or other
  modified_base (21)..(21): a, c, g, t, unknown or other
ggnggnggngayggnggnggn

SEQ ID NO: 4025 - DNA, 21 bp, Artificial Sequence
  Description of Artificial Sequence: Synthetic oligonucleotide
  modified_base (3)..(3): a, c, g, t, unknown or other
  modified_base (6)..(6): a, c, g, t, unknown or other
  modified_base (9)..(9): a, c, g, t, unknown or other
  modified_base (12)..(12): a, c, g, t, unknown or other
  modified_base (18)..(18): a, c, g, t, unknown or other
  modified_base (21)..(21): a, c, g, t, unknown or other
ggnggnggnggngayggnggn

SEQ ID NO: 4026 - DNA, 21 bp, Artificial Sequence
  Description of Artificial Sequence: Synthetic oligonucleotide
  modified_base (3)..(3): a, c, g, t, unknown or other
  modified_base (6)..(6): a, c, g, t, unknown or other
  modified_base (9)..(9): a, c, g, t, unknown or other
  modified_base (12)..(12): a, c, g, t, unknown or other
  modified_base (15)..(15): a, c, g, t, unknown or other
  modified_base (21)..(21): a, c, g, t, unknown or other
ggnggnggnggnggngayggn

SEQ ID NO: 4027 - DNA, 12 bp, Artificial Sequence
  Description of Artificial Sequence: Synthetic oligonucleotide
  modified_base (12)..(12): a, c, g, t, unknown or other
carcarcaracn

SEQ ID NO: 4028 - DNA, 12 bp, Artificial Sequence
  Description of Artificial Sequence: Synthetic oligonucleotide
  modified_base (3)..(3): a, c, g, t, unknown or other
acncarcarcar

SEQ ID NO: 4029 - DNA, 12 bp, Artificial Sequence
  Description of Artificial Sequence: Synthetic oligonucleotide
  modified_base (6)..(6): a, c, g, t, unknown or other
caracncarcar

SEQ ID NO: 4030 - DNA, 12 bp, Artificial Sequence
  Description of Artificial Sequence: Synthetic oligonucleotide
  modified_base (9)..(9): a, c, g, t, unknown or other
carcaracncar

SEQ ID NO: 4031 - DNA, 15 bp, Artificial Sequence
  Description of Artificial Sequence: Synthetic oligonucleotide
  modified_base (15)..(15): a, c, g, t, unknown or other
carcarcarcaracn

SEQ ID NO: 4032 - DNA, 15 bp, Artificial Sequence
  Description of Artificial Sequence: Synthetic oligonucleotide
  modified_base (3)..(3): a, c, g, t, unknown or other
acncarcarcarcar

SEQ ID NO: 4033 - DNA, 15 bp, Artificial Sequence
  Description of Artificial Sequence: Synthetic oligonucleotide
  modified_base (6)..(6): a, c, g, t, unknown or other
caracncarcarcar

SEQ ID NO: 4034 - DNA, 15 bp, Artificial Sequence
  Description of Artificial Sequence: Synthetic oligonucleotide
  modified_base (9)..(9): a, c, g, t, unknown or other
carcaracncarcar

SEQ ID NO: 4035 - DNA, 15 bp, Artificial Sequence
  Description of Artificial Sequence: Synthetic oligonucleotide
  modified_base (12)..(12): a, c, g, t, unknown or other
carcarcaracncar

SEQ ID NO: 4036 - DNA, 15 bp, Artificial Sequence
  Description of Artificial Sequence: Synthetic oligonucleotide
  modified_base (12)..(12): a, c, g, t, unknown or other
  modified_base (15)..(15): a, c, g, t, unknown or other
carcarcaracnacn

SEQ ID NO: 4037 - DNA, 15 bp, Artificial Sequence
  Description of Artificial Sequence: Synthetic oligonucleotide
  modified_base (3)..(3): a, c, g, t, unknown or other
  modified_base (6)..(6): a, c, g, t, unknown or other
acnacncarcarcar

SEQ ID NO: 4038 - DNA, 15 bp, Artificial Sequence
  Description of Artificial Sequence: Synthetic oligonucleotide
  modified_base (3)..(3): a, c, g, t, unknown or other
  modified_base (9)..(9): a, c, g, t, unknown or other
acncaracncarcar

SEQ ID NO: 4039 - DNA, 15 bp, Artificial Sequence
  Description of Artificial Sequence: Synthetic oligonucleotide
  modified_base (3)..(3): a, c, g, t, unknown or other
  modified_base (12)..(12): a, c, g, t, unknown or other
acncarcaracncar

SEQ ID NO: 4040 - DNA, 15 bp, Artificial Sequence
  Description of Artificial Sequence: Synthetic oligonucleotide
  modified_base (3)..(3): a, c, g, t, unknown or other
  modified_base (15)..(15): a, c, g, t, unknown or other
acncarcarcaracn

SEQ ID NO: 4041 - DNA, 15 bp, Artificial Sequence
  Description of Artificial Sequence: Synthetic oligonucleotide
  modified_base (6)..(6): a, c, g, t, unknown or other
  modified_base (9)..(9): a, c, g, t, unknown or other
caracnacncarcar

SEQ ID NO: 4042 - DNA, 15 bp, Artificial Sequence
  Description of Artificial Sequence: Synthetic oligonucleotide
  modified_base (6)..(6): a, c, g, t, unknown or other
  modified_base (12)..(12): a, c, g, t, unknown or other
caracncaracncar

SEQ ID NO: 4043 - DNA, 15 bp, Artificial Sequence
  Description of Artificial Sequence: Synthetic oligonucleotide
  modified_base (6)..(6): a, c, g, t, unknown or other
  modified_base (15)..(15): a, c, g, t, unknown or other
caracncarcaracn

SEQ ID NO: 4044 - DNA, 15 bp, Artificial Sequence
  Description of Artificial Sequence: Synthetic oligonucleotide
  modified_base (9)..(9): a, c, g, t, unknown or other
  modified_base (12)..(12): a, c, g, t, unknown or other
carcaracnacncar

SEQ ID NO: 4045 - DNA, 15 bp, Artificial Sequence
  Description of Artificial Sequence: Synthetic oligonucleotide
  modified_base (9)..(9): a, c, g, t, unknown or other
  modified_base (15)..(15): a, c, g, t, unknown or other
carcaracncaracn

SEQ ID NO: 4046 - DNA, 18 bp, Artificial Sequence
  Description of Artificial Sequence: Synthetic oligonucleotide
  modified_base (18)..(18): a, c, g, t, unknown or other
carcarcarcarcaracn

SEQ ID NO: 4047 - DNA, 18 bp, Artificial Sequence
  Description of Artificial Sequence: Synthetic oligonucleotide
  modified_base (3)..(3): a, c, g, t, unknown or other
acncarcarcarcarcar

SEQ ID NO: 4048 - DNA, 18 bp, Artificial Sequence
  Description of Artificial Sequence: Synthetic oligonucleotide
  modified_base (6)..(6): a, c, g, t, unknown or other
caracncarcarcarcar

SEQ ID NO: 4049 - DNA, 18 bp, Artificial Sequence
  Description of Artificial Sequence: Synthetic oligonucleotide
  modified_base (9)..(9): a, c, g, t, unknown or other
carcaracncarcarcar

SEQ ID NO: 4050 - DNA, 18 bp, Artificial Sequence
  Description of Artificial Sequence: Synthetic oligonucleotide
  modified_base (12)..(12): a, c, g, t, unknown or other
carcarcaracncarcar

SEQ ID NO: 4051 - DNA, 18 bp, Artificial Sequence
  Description of Artificial Sequence: Synthetic oligonucleotide
  modified_base (15)..(15): a, c, g, t, unknown or other
carcarcarcaracncar

SEQ ID NO: 4052 - DNA, 18 bp, Artificial Sequence
  Description of Artificial Sequence: Synthetic oligonucleotide
  modified_base (15)..(15): a, c, g, t, unknown or other
  modified_base (18)..(18): a, c, g, t, unknown or other
carcarcarcaracnacn

SEQ ID NO: 4053 - DNA, 18 bp, Artificial Sequence
  Description of Artificial Sequence: Synthetic oligonucleotide
  modified_base (3)..(3): a, c, g, t, unknown or other
  modified_base (6)..(6): a, c, g, t, unknown or other
acnacncarcarcarcar

SEQ ID NO: 4054 - DNA, 18 bp, Artificial Sequence
  Description of Artificial Sequence: Synthetic oligonucleotide
  modified_base (3)..(3): a, c, g, t, unknown or other
  modified_base (9)..(9): a, c, g, t, unknown or other
acncaracncarcarcar

SEQ ID NO: 4055 - DNA, 18 bp, Artificial Sequence
  Description of Artificial Sequence: Synthetic oligonucleotide
  modified_base (3)..(3): a, c, g, t, unknown or other
  modified_base (12)..(12): a, c, g, t, unknown or other
acncarcaracncarcar

SEQ ID NO: 4056 - DNA, 18 bp, Artificial Sequence
  Description of Artificial Sequence: Synthetic oligonucleotide
  modified_base (3)..(3): a, c, g, t, unknown or other
  modified_base (15)..(15): a, c, g, t, unknown or other
acncarcarcaracncar

SEQ ID NO: 4057 - DNA, 18 bp, Artificial Sequence
  Description of Artificial Sequence: Synthetic oligonucleotide
  modified_base (3)..(3): a, c, g, t, unknown or other
  modified_base (18)..(18): a, c, g, t, unknown or other
acncarcarcarcaracn

SEQ ID NO: 4058 - DNA, 18 bp, Artificial Sequence
  Description of Artificial Sequence: Synthetic oligonucleotide
  modified_base (6)..(6): a, c, g, t, unknown or other
  modified_base (9)..(9): a, c, g, t, unknown or other
caracnacncarcarcar

SEQ ID NO: 4059 - DNA, 18 bp, Artificial Sequence
  Description of Artificial Sequence: Synthetic oligonucleotide
  modified_base (6)..(6): a, c, g, t, unknown or other
  modified_base (12)..(12): a, c, g, t, unknown or other
caracncaracncarcar

SEQ ID NO: 4060 - DNA, 18 bp, Artificial Sequence
  Description of Artificial Sequence: Synthetic oligonucleotide
  modified_base (6)..(6): a, c, g, t, unknown or other
  modified_base (15)..(15): a, c, g, t, unknown or other
caracncarcaracncar

SEQ ID NO: 4061 - DNA, 18 bp, Artificial Sequence
  Description of Artificial Sequence: Synthetic oligonucleotide
  modified_base (6)..(6): a, c, g, t, unknown or other
  modified_base (18)..(18): a, c, g, t, unknown or other
caracncarcarcaracn

SEQ ID NO: 4062 - DNA, 18 bp, Artificial Sequence
  Description of Artificial Sequence: Synthetic oligonucleotide
  modified_base (9)..(9): a, c, g, t, unknown or other
  modified_base (12)..(12): a, c, g, t, unknown or other
carcaracnacncarcar

SEQ ID NO: 4063 - DNA, 18 bp, Artificial Sequence
  Description of Artificial Sequence: Synthetic oligonucleotide
  modified_base (9)..(9): a, c, g, t, unknown or other
  modified_base (15)..(15): a, c, g, t, unknown or other
carcaracncaracncar

SEQ ID NO: 4064 - DNA, 18 bp, Artificial Sequence
  Description of Artificial Sequence: Synthetic oligonucleotide
  modified_base (9)..(9): a, c, g, t, unknown or other
  modified_base (18)..(18): a, c, g, t, unknown or other
carcaracncarcaracn

SEQ ID NO: 4065 - DNA, 18 bp, Artificial Sequence
  Description of Artificial Sequence: Synthetic oligonucleotide
  modified_base (12)..(12): a, c, g, t, unknown or other
  modified_base (15)..(15): a, c, g, t, unknown or other
carcarcaracnacncar

SEQ ID NO: 4066 - DNA, 18 bp, Artificial Sequence
  Description of Artificial Sequence: Synthetic oligonucleotide
  modified_base (12)..(12): a, c, g, t, unknown or other
  modified_base (18)..(18): a, c, g, t, unknown or other
carcarcaracncaracn

SEQ ID NO: 4067 - DNA, 21 bp, Artificial Sequence
  Description of Artificial Sequence: Synthetic oligonucleotide
  modified_base (15)..(15): a, c, g, t, unknown or other
  modified_base (18)..(18): a, c, g, t, unknown or other
  modified_base (21)..(21): a, c, g, t, unknown or other
carcarcarcaracnacnacn

SEQ ID NO: 4068 - DNA, 21 bp, Artificial Sequence
  Description of Artificial Sequence: Synthetic oligonucleotide
  modified_base (3)..(3): a, c, g, t, unknown or other
  modified_base (6)..(6): a, c, g, t, unknown or other
  modified_base (9)..(9): a, c, g, t, unknown or other
acnacnacncarcarcarcar

SEQ ID NO: 4069 - DNA, 21 bp, Artificial Sequence
  Description of Artificial Sequence: Synthetic oligonucleotide
  modified_base (3)..(3): a, c, g, t, unknown or other
  modified_base (9)..(9): a, c, g, t, unknown or other
  modified_base (12)..(12): a, c, g, t, unknown or other
acncaracnacncarcarcar

SEQ ID NO: 4070 - DNA, 21 bp, Artificial Sequence
  Description of Artificial Sequence: Synthetic oligonucleotide
  modified_base (3)..(3): a, c, g, t, unknown or other
  modified_base (9)..(9): a, c, g, t, unknown or other
  modified_base (15)..(15): a, c, g, t, unknown or other
acncaracncaracncarcar

SEQ ID NO: 4071 - DNA, 21 bp, Artificial Sequence
  Description of Artificial Sequence: Synthetic oligonucleotide
  modified_base (3)..(3): a, c, g, t, unknown or other
  modified_base (9)..(9): a, c, g, t, unknown or other
  modified_base (18)..(18): a, c, g, t, unknown or other
acncaracncarcaracncar

SEQ ID NO: 4072 - DNA, 21 bp, Artificial Sequence
  Description of Artificial Sequence: Synthetic oligonucleotide
  modified_base (3)..(3): a, c, g, t, unknown or other
  modified_base (9)..(9): a, c, g, t, unknown or other
  modified_base (21)..(21): a, c, g, t, unknown or other
acncaracncarcarcaracn

SEQ ID NO: 4073 - DNA, 21 bp, Artificial Sequence
  Description of Artificial Sequence: Synthetic oligonucleotide
  modified_base (3)..(3): a, c, g, t, unknown or other
  modified_base (12)..(12): a, c, g, t, unknown or other
  modified_base (15)..(15): a, c, g, t, unknown or other
acncarcaracnacncarcar

SEQ ID NO: 4074 - DNA, 21 bp, Artificial Sequence
  Description of Artificial Sequence: Synthetic oligonucleotide
  modified_base (3)..(3): a, c, g, t, unknown or other
  modified_base (12)..(12): a, c, g, t, unknown or other
  modified_base (18)..(18): a, c, g, t, unknown or other
acncarcaracncaracncar

SEQ ID NO: 4075 - DNA, 21 bp, Artificial Sequence
  Description of Artificial Sequence: Synthetic oligonucleotide
  modified_base (3)..(3): a, c, g, t, unknown or other
  modified_base (12)..(12): a, c, g, t, unknown or other
  modified_base (21)..(21): a, c, g, t, unknown or other
acncarcaracncarcaracn

SEQ ID NO: 4076 - DNA, 21 bp, Artificial Sequence
  Description of Artificial Sequence: Synthetic oligonucleotide
  modified_base (3)..(3): a, c, g, t, unknown or other
  modified_base (15)..(15): a, c, g, t, unknown or other
  modified_base (21)..(21): a, c, g, t, unknown or other
acncarcarcaracncaracn

SEQ ID NO: 4077 - DNA, 21 bp, Artificial Sequence
  Description of Artificial Sequence: Synthetic oligonucleotide
  modified_base (3)..(3): a, c, g, t, unknown or other
  modified_base (15)..(15): a, c, g, t, unknown or other
  modified_base (18)..(18): a, c, g, t, unknown or other
acncarcarcaracnacncar

SEQ ID NO: 4078 - DNA, 21 bp, Artificial Sequence
  Description of Artificial Sequence: Synthetic oligonucleotide
  modified_base (3)..(3): a, c, g, t, unknown or other
  modified_base (18)..(18): a, c, g, t, unknown or other
  modified_base (21)..(21): a, c, g, t, unknown or other
acncarcarcarcaracnacn

SEQ ID NO: 4079 - DNA, 21 bp, Artificial Sequence
  Description of Artificial Sequence: Synthetic oligonucleotide
  modified_base (3)..(3): a, c, g, t, unknown or other
  modified_base (6)..(6): a, c, g, t, unknown or other
  modified_base (12)..(12): a, c, g, t, unknown or other
acnacncaracncarcarcar

SEQ ID NO: 4080 - DNA, 21 bp, Artificial Sequence
  Description of Artificial Sequence: Synthetic oligonucleotide
  modified_base (3)..(3): a, c, g, t, unknown or other
  modified_base (6)..(6): a, c, g, t, unknown or other
  modified_base (15)..(15): a, c, g, t, unknown or other
acnacncarcaracncarcar

SEQ ID NO: 4081 - DNA, 21 bp, Artificial Sequence
  Description of Artificial Sequence: Synthetic oligonucleotide
  modified_base (3)..(3): a, c, g, t, unknown or other
  modified_base (6)..(6): a, c, g, t, unknown or other
  modified_base (18)..(18): a, c, g, t, unknown or other
acnacncarcarcaracncar

SEQ ID NO: 4082 - DNA, 21 bp, Artificial Sequence
  Description of Artificial Sequence: Synthetic oligonucleotide
  modified_base (3)..(3): a, c, g, t, unknown or other
  modified_base (6)..(6): a, c, g, t, unknown or other
  modified_base (21)..(21): a, c, g, t, unknown or other
acnacncarcarcarcaracn

SEQ ID NO: 4083 - DNA, 21 bp, Artificial Sequence
  Description of Artificial Sequence: Synthetic oligonucleotide
  modified_base (6)..(6): a, c, g, t, unknown or other
  modified_base (9)..(9): a, c, g, t, unknown or other
  modified_base (12)..(12): a, c, g, t, unknown or other
caracnacnacncarcarcar

SEQ ID NO: 4084 - DNA, 21 bp, Artificial Sequence
  Description of Artificial Sequence: Synthetic oligonucleotide
  modified_base (6)..(6): a, c, g, t, unknown or other
  modified_base (9)..(9): a, c, g, t, unknown or other
  modified_base (15)..(15): a, c, g, t, unknown or other
caracnacncaracncarcar

SEQ ID NO: 4085 - DNA, 21 bp, Artificial Sequence
  Description of Artificial Sequence: Synthetic oligonucleotide
  modified_base (6)..(6): a, c, g, t, unknown or other
  modified_base (9)..(9): a, c, g, t, unknown or other
  modified_base (18)..(18): a, c, g, t, unknown or other
caracnacncarcaracncar

SEQ ID NO: 4086 - DNA, 21 bp, Artificial Sequence
  Description of Artificial Sequence: Synthetic oligonucleotide
  modified_base (6)..(6): a, c, g, t, unknown or other
  modified_base (9)..(9): a, c, g, t, unknown or other
  modified_base (21)..(21): a, c, g, t, unknown or other
caracnacncarcarcaracn

SEQ ID NO: 4087 - DNA, 21 bp, Artificial Sequence
  Description of Artificial Sequence: Synthetic oligonucleotide
  modified_base (6)..(6): a, c, g, t, unknown or other
  modified_base (12)..(12): a, c, g, t, unknown or other
  modified_base (15)..(15): a, c, g, t, unknown or other
caracncaracnacncarcar

SEQ ID NO: 4088 - DNA, 21 bp, Artificial Sequence
  Description of Artificial Sequence: Synthetic oligonucleotide
  modified_base (6)..(6): a, c, g, t, unknown or other
  modified_base (15)..(15): a, c, g, t, unknown or other
  modified_base (18)..(18): a, c, g, t, unknown or other
caracncarcaracnacncar

SEQ ID NO: 4089 - DNA, 21 bp, Artificial Sequence
  Description of Artificial Sequence: Synthetic oligonucleotide
  modified_base (6)..(6): a, c, g, t, unknown or other
  modified_base (18)..(18): a, c, g, t, unknown or other
  modified_base (21)..(21): a, c, g, t, unknown or other
caracncarcarcaracnacn

SEQ ID NO: 4090 - DNA, 21 bp, Artificial Sequence
  Description of Artificial Sequence: Synthetic oligonucleotide
  modified_base (6)..(6): a, c, g, t, unknown or other
  modified_base (12)..(12): a, c, g, t, unknown or other
  modified_base (18)..(18): a, c, g, t, unknown or other
caracncaracncaracncar

SEQ ID NO: 4091 - DNA, 21 bp, Artificial Sequence
  Description of Artificial Sequence: Synthetic oligonucleotide
  modified_base (6)..(6): a, c, g, t, unknown or other
  modified_base (12)..(12): a, c, g, t, unknown or other
  modified_base (21)..(21): a, c, g, t, unknown or other
caracncaracncarcaracn

SEQ ID NO: 4092 - DNA, 21 bp, Artificial Sequence
  Description of Artificial Sequence: Synthetic oligonucleotide
  modified_base (6)..(6): a, c, g, t, unknown or other
  modified_base (15)..(15): a, c, g, t, unknown or other
  modified_base (21)..(21): a, c, g, t, unknown or other
caracncarcaracncaracn

SEQ ID NO: 4093 - DNA, 21 bp, Artificial Sequence
  Description of Artificial Sequence: Synthetic oligonucleotide
  modified_base (9)..(9): a, c, g, t, unknown or other
  modified_base (12)..(12): a, c, g, t, unknown or other
  modified_base (15)..(15): a, c, g, t, unknown or other
carcaracnacnacncarcar

SEQ ID NO: 4094 - DNA, 21 bp, Artificial Sequence
  Description of Artificial Sequence: Synthetic oligonucleotide
  modified_base (9)..(9): a, c, g, t, unknown or other
  modified_base (12)..(12): a, c, g, t, unknown or other
  modified_base (18)..(18): a, c, g, t, unknown or other
carcaracnacncaracncar

SEQ ID NO: 4095 - DNA, 21 bp, Artificial Sequence
  Description of Artificial Sequence: Synthetic oligonucleotide
  modified_base (9)..(9): a, c, g, t, unknown or other
  modified_base (12)..(12): a, c, g, t, unknown or other
  modified_base (21)..(21): a, c, g, t, unknown or other
carcaracnacncarcaracn

SEQ ID NO: 4096 - DNA, 21 bp, Artificial Sequence
  Description of Artificial Sequence: Synthetic oligonucleotide
  modified_base (9)..(9): a, c, g, t, unknown or other
  modified_base (15)..(15): a, c, g, t, unknown or other
  modified_base (18)..(18): a, c, g, t, unknown or other
carcaracncaracnacncar

SEQ ID NO: 4097 - DNA, 21 bp, Artificial Sequence
  Description of Artificial Sequence: Synthetic oligonucleotide
  modified_base (9)..(9): a, c, g, t, unknown or other
  modified_base (15)..(15): a, c, g, t, unknown or other
  modified_base (21)..(21): a, c, g, t, unknown or other
carcaracncaracncaracn

SEQ ID NO: 4098 - DNA, 21 bp, Artificial Sequence
  Description of Artificial Sequence: Synthetic oligonucleotide
  modified_base (9)..(9): a, c, g, t, unknown or other
  modified_base (18)..(18): a, c, g, t, unknown or other
  modified_base (21)..(21): a, c, g, t, unknown or other
carcaracncarcaracnacn

SEQ ID NO: 4099 - DNA, 21 bp, Artificial Sequence
  Description of Artificial Sequence: Synthetic oligonucleotide
  modified_base (12)..(12): a, c, g, t, unknown or other
  modified_base (15)..(15): a, c, g, t, unknown or other
  modified_base (18)..(18): a, c, g, t, unknown or other
carcarcaracnacnacncar

SEQ ID NO: 4100 - DNA, 21 bp, Artificial Sequence
  Description of Artificial Sequence: Synthetic oligonucleotide
  modified_base (12)..(12): a, c, g, t, unknown or other
  modified_base (15)..(15): a, c, g, t, unknown or other
  modified_base (21)..(21): a, c, g, t, unknown or other
carcarcaracnacncaracn

SEQ ID NO: 4101 - DNA, 21 bp, Artificial Sequence
  Description of Artificial Sequence: Synthetic oligonucleotide
  modified_base (12)..(12): a, c, g, t, unknown or other
  modified_base (18)..(18): a, c, g, t, unknown or other
  modified_base (21)..(21): a, c, g, t, unknown or other
carcarcaracncaracnacn

SEQ ID NO: 4102 - DNA, 21 bp, Artificial Sequence
  Description of Artificial Sequence: Synthetic oligonucleotide
  modified_base (18)..(18): a, c, g, t, unknown or other
  modified_base (21)..(21): a, c, g, t, unknown or other
carcarcarcarcaracnacn

SEQ ID NO: 4103 - DNA, 21 bp, Artificial Sequence
  Description of Artificial Sequence: Synthetic oligonucleotide
  modified_base (3)..(3): a, c, g, t, unknown or other
  modified_base (6)..(6): a, c, g, t, unknown or other
acnacncarcarcarcarcar

SEQ ID NO: 4104 - DNA, 21 bp, Artificial Sequence
  Description of Artificial Sequence: Synthetic oligonucleotide
  modified_base (3)..(3): a, c, g, t, unknown or other
  modified_base (9)..(9): a, c, g, t, unknown or other
acncaracncarcarcarcar

SEQ ID NO: 4105 - DNA, 21 bp, Artificial Sequence
  Description of Artificial Sequence: Synthetic oligonucleotide
  modified_base (3)..(3): a, c, g, t, unknown or other
  modified_base (12)..(12): a, c, g, t, unknown or other
acncarcaracncarcarcar

SEQ ID NO: 4106 - DNA, 21 bp, Artificial Sequence
  Description of Artificial Sequence: Synthetic oligonucleotide
  modified_base (3)..(3): a, c, g, t, unknown or other
  modified_base (15)..(15): a, c, g, t, unknown or other
acncarcarcaracncarcar

SEQ ID NO: 4107 - DNA, 21 bp, Artificial Sequence
  Description of Artificial Sequence: Synthetic oligonucleotide
  modified_base (3)..(3): a, c, g, t, unknown or other
  modified_base (18)..(18): a, c, g, t, unknown or other
acncarcarcarcaracncar

SEQ ID NO: 4108 - DNA, 21 bp, Artificial Sequence
  Description of Artificial Sequence: Synthetic oligonucleotide
  modified_base (3)..(3): a, c, g, t, unknown or other
  modified_base (21)..(21): a, c, g, t, unknown or other
acncarcarcarcarcaracn

SEQ ID NO: 4109 - DNA, 21 bp, Artificial Sequence
  Description of Artificial Sequence: Synthetic oligonucleotide
  modified_base (6)..(6): a, c, g, t, unknown or other
  modified_base (9)..(9): a, c, g, t, unknown or other
caracnacncarcarcarcar

SEQ ID NO: 4110 - DNA, 21 bp, Artificial Sequence
  Description of Artificial Sequence: Synthetic oligonucleotide
  modified_base (6)..(6): a, c, g, t, unknown or other
  modified_base (12)..(12): a, c, g, t, unknown or other
caracncaracncarcarcar

SEQ ID NO: 4111 - DNA, 21 bp, Artificial Sequence
  Description of Artificial Sequence: Synthetic oligonucleotide
  modified_base (6)..(6): a, c, g, t, unknown or other
  modified_base (15)..(15): a, c, g, t, unknown or other
caracncarcaracncarcar

SEQ ID NO: 4112 - DNA, 21 bp, Artificial Sequence
  Description of Artificial Sequence: Synthetic oligonucleotide
  modified_base (6)..(6): a, c, g, t, unknown or other
  modified_base (18)..(18): a, c, g, t, unknown or other
caracncarcarcaracncar

SEQ ID NO: 4113 - DNA, 21 bp, Artificial Sequence
  Description of Artificial Sequence: Synthetic oligonucleotide
  modified_base (6)..(6): a, c, g, t, unknown or other
  modified_base (21)..(21): a, c, g, t, unknown or other
caracncarcarcarcaracn

SEQ ID NO: 4114 - DNA, 21 bp, Artificial Sequence
  Description of Artificial Sequence: Synthetic oligonucleotide
  modified_base (9)..(9): a, c, g, t, unknown or other
  modified_base (12)..(12): a, c, g, t, unknown or other
carcaracnacncarcarcar

SEQ ID NO: 4115 - DNA, 21 bp, Artificial Sequence
  Description of Artificial Sequence: Synthetic oligonucleotide
  modified_base (9)..(9): a, c, g, t, unknown or other
  modified_base (15)..(15): a, c, g, t, unknown or other
carcaracncaracncarcar

SEQ ID NO: 4116 - DNA, 21 bp, Artificial Sequence
  Description of Artificial Sequence: Synthetic oligonucleotide
  modified_base (9)..(9): a, c, g, t, unknown or other
  modified_base (18)..(18): a, c, g, t, unknown or other
carcaracncarcaracncar

SEQ ID NO: 4117 - DNA, 21 bp, Artificial Sequence
  Description of Artificial Sequence: Synthetic oligonucleotide
  modified_base (9)..(9): a, c, g, t, unknown or other
  modified_base (21)..(21): a, c, g, t, unknown or other
carcaracncarcarcaracn

SEQ ID NO: 4118 - DNA, 21 bp, Artificial Sequence
  Description of Artificial Sequence: Synthetic oligonucleotide
  modified_base (12)..(12): a, c, g, t, unknown or other
  modified_base (15)..(15): a, c, g, t, unknown or other
carcarcaracnacncarcar

SEQ ID NO: 4119 - DNA, 21 bp, Artificial Sequence
  Description of Artificial Sequence: Synthetic oligonucleotide
  modified_base (12)..(12): a, c, g, t, unknown or other
  modified_base (18)..(18): a, c, g, t, unknown or other
carcarcaracncaracncar

SEQ ID NO: 4120 - DNA, 21 bp, Artificial Sequence
  Description of Artificial Sequence: Synthetic oligonucleotide
  modified_base (12)..(12): a, c, g, t, unknown or other
  modified_base (21)..(21): a, c, g, t, unknown or other
carcarcaracncarcaracn

SEQ ID NO: 4121 - DNA, 21 bp, Artificial Sequence
  Description of Artificial Sequence: Synthetic oligonucleotide
  modified_base (15)..(15): a, c, g, t, unknown or other
  modified_base (18)..(18): a, c, g, t, unknown or other
carcarcarcaracnacncar

SEQ ID NO: 4122 - DNA, 21 bp, Artificial Sequence
  Description of Artificial Sequence: Synthetic oligonucleotide
  modified_base (15)..(15): a, c, g, t, unknown or other
  modified_base (21)..(21): a, c, g, t, unknown or other
carcarcarcaracncaracn

SEQ ID NO: 4123 - DNA, 21 bp, Artificial Sequence
  Description of Artificial Sequence: Synthetic oligonucleotide
  modified_base (21)..(21): a, c, g, t, unknown or other
carcarcarcarcarcaracn

SEQ ID NO: 4124 - DNA, 21 bp, Artificial Sequence
  Description of Artificial Sequence: Synthetic oligonucleotide
  modified_base (3)..(3): a, c, g, t, unknown or other
acncarcarcarcarcarcar

SEQ ID NO: 4125 - DNA, 21 bp, Artificial Sequence
  Description of Artificial Sequence: Synthetic oligonucleotide
  modified_base (6)..(6): a, c, g, t, unknown or other
caracncarcarcarcarcar

SEQ ID NO: 4126 - DNA, 21 bp, Artificial Sequence
  Description of Artificial Sequence: Synthetic oligonucleotide
  modified_base (9)..(9): a, c, g, t, unknown or other
carcaracncarcarcarcar

SEQ ID NO: 4127 - DNA, 21 bp, Artificial Sequence
  Description of Artificial Sequence: Synthetic oligonucleotide
  modified_base (12)..(12): a, c, g, t, unknown or other
carcarcaracncarcarcar

SEQ ID NO: 4128 - DNA, 21 bp, Artificial Sequence
  Description of Artificial Sequence: Synthetic oligonucleotide
  modified_base (15)..(15): a, c, g, t, unknown or other
carcarcarcaracncarcar

SEQ ID NO: 4129 - DNA, 21 bp, Artificial Sequence
  Description of Artificial Sequence: Synthetic oligonucleotide
  modified_base (18)..(18): a, c, g, t, unknown or other
carcarcarcarcaracncar

SEQ ID NO: 4130 - DNA, 12 bp, Artificial Sequence
  Description of Artificial Sequence: Synthetic oligonucleotide
  modified_base (12)..(12): a, c, g, t, unknown or other
carcarcargcn

SEQ ID NO: 4131 - DNA, 12 bp, Artificial Sequence
  Description of Artificial Sequence: Synthetic oligonucleotide
  modified_base (3)..(3): a, c, g, t, unknown or other
gcncarcarcar

SEQ ID NO: 4132 - DNA, 12 bp, Artificial Sequence
  Description of Artificial Sequence: Synthetic oligonucleotide
  modified_base (6)..(6): a, c, g, t, unknown or other
cargcncarcar

SEQ ID NO: 4133 - DNA, 12 bp, Artificial Sequence
  Description of Artificial Sequence: Synthetic oligonucleotide
  modified_base (9)..(9): a, c, g, t, unknown or other
carcargcncar

SEQ ID NO: 4134 - DNA, 15 bp, Artificial Sequence
  Description of Artificial Sequence: Synthetic oligonucleotide
  modified_base (15)..(15): a, c, g, t, unknown or other
carcarcarcargcn

SEQ ID NO: 4135 - DNA, 15 bp, Artificial Sequence
  Description of Artificial Sequence: Synthetic oligonucleotide
  modified_base (3)..(3): a, c, g, t, unknown or other
gcncarcarcarcar

SEQ ID NO: 4136 - DNA, 15 bp, Artificial Sequence
  Description of Artificial Sequence: Synthetic oligonucleotide
  modified_base (6)..(6): a, c, g, t, unknown or other
cargcncarcarcar

SEQ ID NO: 4137 - DNA, 15 bp, Artificial Sequence
  Description of Artificial Sequence: Synthetic oligonucleotide
  modified_base (9)..(9): a, c, g, t, unknown or other
carcargcncarcar

SEQ ID NO: 4138 - DNA, 15 bp, Artificial Sequence
  Description of Artificial Sequence: Synthetic oligonucleotide
  modified_base (12)..(12): a, c, g, t, unknown or other
carcarcargcncar

SEQ ID NO: 4139 - DNA, 15 bp, Artificial Sequence
  Description of Artificial Sequence: Synthetic oligonucleotide
  modified_base (12)..(12): a, c, g, t, unknown or other
  modified_base (15)..(15): a, c, g, t, unknown or other
carcarcargcngcn

SEQ ID NO: 4140 - DNA, 15 bp, Artificial Sequence
  Description of Artificial Sequence: Synthetic oligonucleotide
  modified_base (3)..(3): a, c, g, t, unknown or other
  modified_base (6)..(6): a, c, g, t, unknown or other
gcngcncarcarcar

SEQ ID NO: 4141 - DNA, 15 bp, Artificial Sequence
  Description of Artificial Sequence: Synthetic oligonucleotide
  modified_base (3)..(3): a, c, g, t, unknown or other
  modified_base (9)..(9): a, c, g, t, unknown or other
gcncargcncarcar

SEQ ID NO: 4142 - DNA, 15 bp, Artificial Sequence
  Description of Artificial Sequence: Synthetic oligonucleotide
  modified_base (3)..(3): a, c, g, t, unknown or other
  modified_base (12)..(12): a, c, g, t, unknown or other
gcncarcargcncar

SEQ ID NO: 4143 - DNA, 15 bp, Artificial Sequence
  Description of Artificial Sequence: Synthetic oligonucleotide
  modified_base (3)..(3): a, c, g, t, unknown or other
  modified_base (15)..(15): a, c, g, t, unknown or other
gcncarcarcargcn

SEQ ID NO: 4144 - DNA, 15 bp, Artificial Sequence
  Description of Artificial Sequence: Synthetic oligonucleotide
  modified_base (6)..(6): a, c, g, t, unknown or other
  modified_base (9)..(9): a, c, g, t, unknown or other
cargcngcncarcar

SEQ ID NO: 4145 - DNA, 15 bp, Artificial Sequence
  Description of Artificial Sequence: Synthetic oligonucleotide
  modified_base (6)..(6): a, c, g, t, unknown or other
  modified_base (12)..(12): a, c, g, t, unknown or other
cargcncargcncar

SEQ ID NO: 4146 - DNA, 15 bp, Artificial Sequence
  Description of Artificial Sequence: Synthetic oligonucleotide
  modified_base (6)..(6): a, c, g, t, unknown or other
  modified_base (15)..(15): a, c, g, t, unknown or other
cargcncarcargcn

SEQ ID NO: 4147 - DNA, 15 bp, Artificial Sequence
  Description of Artificial Sequence: Synthetic oligonucleotide
  modified_base (9)..(9): a, c, g, t, unknown or other
  modified_base (12)..(12): a, c, g, t, unknown or other
carcargcngcncar

SEQ ID NO: 4148 - DNA, 15 bp, Artificial Sequence
  Description of Artificial Sequence: Synthetic oligonucleotide
  modified_base (9)..(9): a, c, g, t, unknown or other
  modified_base (15)..(15): a, c, g, t, unknown or other
carcargcncargcn

SEQ ID NO: 4149 - DNA, 18 bp, Artificial Sequence
  Description of Artificial Sequence: Synthetic oligonucleotide
  modified_base (18)..(18): a, c, g, t, unknown or other
carcarcarcarcargcn

SEQ ID NO: 4150 - DNA, 18 bp, Artificial Sequence
  Description of Artificial Sequence: Synthetic oligonucleotide
  modified_base (3)..(3): a, c, g, t, unknown or other
gcncarcarcarcarcar

SEQ ID NO: 4151 - DNA, 18 bp, Artificial Sequence
  Description of Artificial Sequence: Synthetic oligonucleotide
  modified_base (6)..(6): a, c, g, t, unknown or other
cargcncarcarcarcar

SEQ ID NO: 4152 - DNA, 18 bp, Artificial Sequence
  Description of Artificial Sequence: Synthetic oligonucleotide
  modified_base (9)..(9): a, c, g, t, unknown or other
carcargcncarcarcar

SEQ ID NO: 4153 - DNA, 18 bp, Artificial Sequence
  Description of Artificial Sequence: Synthetic oligonucleotide
  modified_base (12)..(12): a, c, g, t, unknown or other
carcarcargcncarcar

SEQ ID NO: 4154 - DNA, 18 bp, Artificial Sequence
  Description of Artificial Sequence: Synthetic oligonucleotide
  modified_base (15)..(15): a, c, g, t, unknown or other
carcarcarcargcncar

SEQ ID NO: 4155 - DNA, 18 bp, Artificial Sequence
  Description of Artificial Sequence: Synthetic oligonucleotide
  modified_base (15)..(15): a, c, g, t, unknown or other
  modified_base (18)..(18): a, c, g, t, unknown or other
carcarcarcargcngcn

SEQ ID NO: 4156 - DNA, 18 bp, Artificial Sequence
  Description of Artificial Sequence: Synthetic oligonucleotide
  modified_base (3)..(3): a, c, g, t, unknown or other
  modified_base (6)..(6): a, c, g, t, unknown or other
gcngcncarcarcarcar

SEQ ID NO: 4157 - DNA, 18 bp, Artificial Sequence
  Description of Artificial Sequence: Synthetic oligonucleotide
  modified_base (3)..(3): a, c, g, t, unknown or other
  modified_base (9)..(9): a, c, g, t, unknown or other
gcncargcncarcarcar

SEQ ID NO: 4158 - DNA, 18 bp, Artificial Sequence
  Description of Artificial Sequence: Synthetic oligonucleotide
  modified_base (3)..(3): a, c, g, t, unknown or other
  modified_base (12)..(12): a, c, g, t, unknown or other
gcncarcargcncarcar

SEQ ID NO: 4159 - DNA, 18 bp, Artificial Sequence
  Description of Artificial Sequence: Synthetic oligonucleotide
  modified_base (3)..(3): a, c, g, t, unknown or other
  modified_base (15)..(15): a, c, g, t, unknown or other
gcncarcarcargcncar

SEQ ID NO: 4160 - DNA, 18 bp, Artificial Sequence
  Description of Artificial Sequence: Synthetic oligonucleotide
  modified_base (3)..(3): a, c, g, t, unknown or other
  modified_base (18)..(18): a, c, g, t, unknown or other
gcncarcarcarcargcn

SEQ ID NO: 4161 - DNA, 18 bp, Artificial Sequence
  Description of Artificial Sequence: Synthetic oligonucleotide
  modified_base (6)..(6): a, c, g, t, unknown or other
  modified_base (9)..(9): a, c, g, t, unknown or other
cargcngcncarcarcar

SEQ ID NO: 4162 - DNA, 18 bp, Artificial Sequence
  Description of Artificial Sequence: Synthetic oligonucleotide
  modified_base (6)..(6): a, c, g, t, unknown or other
  modified_base (12)..(12): a, c, g, t, unknown or other
cargcncargcncarcar

SEQ ID NO: 4163 - DNA, 18 bp, Artificial Sequence
  Description of Artificial Sequence: Synthetic oligonucleotide
  modified_base (6)..(6): a, c, g, t, unknown or other
  modified_base (15)..(15): a, c, g, t, unknown or other
cargcncarcargcncar

SEQ ID NO: 4164 - DNA, 18 bp, Artificial Sequence
  Description of Artificial Sequence: Synthetic oligonucleotide
  modified_base (6)..(6): a, c, g, t, unknown or other
  modified_base (18)..(18): a, c, g, t, unknown or other
cargcncarcarcargcn

SEQ ID NO: 4165 - DNA, 18 bp, Artificial Sequence
  Description of Artificial Sequence: Synthetic oligonucleotide
  modified_base (9)..(9): a, c, g, t, unknown or other
  modified_base (12)..(12): a, c, g, t, unknown or other
carcargcngcncarcar

SEQ ID NO: 4166 - DNA, 18 bp, Artificial Sequence
  Description of Artificial Sequence: Synthetic oligonucleotide
  modified_base (9)..(9): a, c, g, t, unknown or other
  modified_base (15)..(15): a, c, g, t, unknown or other
carcargcncargcncar

SEQ ID NO: 4167 - DNA, 18 bp, Artificial Sequence
  Description of Artificial Sequence: Synthetic oligonucleotide
  modified_base (9)..(9): a, c, g, t, unknown or other
  modified_base (18)..(18): a, c, g, t, unknown or other
carcargcncarcargcn

SEQ ID NO: 4168 - DNA, 18 bp, Artificial Sequence
  Description of Artificial Sequence: Synthetic oligonucleotide
  modified_base (12)..(12): a, c, g, t, unknown or other
  modified_base (15)..(15): a, c, g, t, unknown or other
carcarcargcngcncar

SEQ ID NO: 4169 - DNA, 18 bp, Artificial Sequence
  Description of Artificial Sequence: Synthetic oligonucleotide
  modified_base (12)..(12): a, c, g, t, unknown or other
  modified_base (18)..(18): a, c, g, t, unknown or other
carcarcargcncargcn

SEQ ID NO: 4170 - DNA, 21 bp, Artificial Sequence
  Description of Artificial Sequence: Synthetic oligonucleotide
  modified_base (15)..(15): a, c, g, t, unknown or other
  modified_base (18)..(18): a, c, g, t, unknown or other
  modified_base (21)..(21): a, c, g, t, unknown or other
carcarcarcargcngcngcn

SEQ ID NO: 4171 - DNA, 21 bp, Artificial Sequence
  Description of Artificial Sequence: Synthetic oligonucleotide
  modified_base (3)..(3): a, c, g, t, unknown or other
  modified_base (6)..(6): a, c, g, t, unknown or other
  modified_base (9)..(9): a, c, g, t, unknown or other
gcngcngcncarcarcarcar

SEQ ID NO: 4172 - DNA, 21 bp, Artificial Sequence
  Description of Artificial Sequence: Synthetic oligonucleotide
  modified_base (3)..(3): a, c, g, t, unknown or other
  modified_base (9)..(9): a, c, g, t, unknown or other
  modified_base (12)..(12): a, c, g, t, unknown or other
gcncargcngcncarcarcar

SEQ ID NO: 4173 - DNA, 21 bp, Artificial Sequence
  Description of Artificial Sequence: Synthetic oligonucleotide
  modified_base (3)..(3): a, c, g, t, unknown or other
  modified_base (9)..(9): a, c, g, t, unknown or other
  modified_base (15)..(15): a, c, g, t, unknown or other
gcncargcncargcncarcar

SEQ ID NO: 4174 - DNA, 21 bp, Artificial Sequence
  Description of Artificial Sequence: Synthetic oligonucleotide
  modified_base (3)..(3): a, c, g, t, unknown or other
  modified_base (9)..(9): a, c, g, t, unknown or other
  modified_base (18)..(18): a, c, g, t, unknown or other
gcncargcncarcargcncar

SEQ ID NO: 4175 - DNA, 21 bp, Artificial Sequence
  Description of Artificial Sequence: Synthetic oligonucleotide
  modified_base (3)..(3): a, c, g, t, unknown or other
  modified_base (9)..(9): a, c, g, t, unknown or other
  modified_base (21)..(21): a, c, g, t, unknown or other
gcncargcncarcarcargcn

SEQ ID NO: 4176 - DNA, 21 bp, Artificial Sequence
  Description of Artificial Sequence: Synthetic oligonucleotide
  modified_base (3)..(3): a, c, g, t, unknown or other
  modified_base (12)..(12): a, c, g, t, unknown or other
  modified_base (15)..(15): a, c, g, t, unknown or other
gcncarcargcngcncarcar

SEQ ID NO: 4177 - DNA, 21 bp, Artificial Sequence
  Description of Artificial Sequence: Synthetic oligonucleotide
  modified_base (3)..(3): a, c, g, t, unknown or other
  modified_base (12)..(12): a, c, g, t, unknown or other
  modified_base (18)..(18): a, c, g, t, unknown or other
gcncarcargcncargcncar

SEQ ID NO: 4178 - DNA, 21 bp, Artificial Sequence
  Description of Artificial Sequence: Synthetic oligonucleotide
  modified_base (3)..(3): a, c, g, t, unknown or other
  modified_base (12)..(12): a, c, g, t, unknown or other
  modified_base (21)..(21): a, c, g, t, unknown or other
gcncarcargcncarcargcn

SEQ ID NO: 4179 - DNA, 21 bp, Artificial Sequence
  Description of Artificial Sequence: Synthetic oligonucleotide
  modified_base (3)..(3): a, c, g, t, unknown or other
  modified_base (15)..(15): a, c, g, t, unknown or other
  modified_base (21)..(21): a, c, g, t, unknown or other
gcncarcarcargcncargcn

SEQ ID NO: 4180 - DNA, 21 bp, Artificial Sequence
  Description of Artificial Sequence: Synthetic oligonucleotide
  modified_base (3)..(3): a, c, g, t, unknown or other
  modified_base (15)..(15): a, c, g, t, unknown or other
  modified_base (18)..(18): a, c, g, t, unknown or other
gcncarcarcargcngcncar

SEQ ID NO: 4181 - DNA, 21 bp, Artificial Sequence
  Description of Artificial Sequence: Synthetic oligonucleotide
  modified_base (3)..(3): a, c, g, t, unknown or other
  modified_base (18)..(18): a, c, g, t, unknown or other
  modified_base (21)..(21): a, c, g, t, unknown or other
gcncarcarcarcargcngcn

SEQ ID NO: 4182 - DNA, 21 bp, Artificial Sequence
  Description of Artificial Sequence: Synthetic oligonucleotide
  modified_base (3)..(3): a, c, g, t, unknown or other
  modified_base (6)..(6): a, c, g, t, unknown or other
  modified_base (12)..(12): a, c, g, t, unknown or other
gcngcncargcncarcarcar

SEQ ID NO: 4183 - DNA, 21 bp, Artificial Sequence
  Description of Artificial Sequence: Synthetic oligonucleotide
  modified_base (3)..(3): a, c, g, t, unknown or other
  modified_base (6)..(6): a, c, g, t, unknown or other
  modified_base (15)..(15): a, c, g, t, unknown or other
gcngcncarcargcncarcar

SEQ ID NO: 4184 - DNA, 21 bp, Artificial Sequence
  Description of Artificial Sequence: Synthetic oligonucleotide
  modified_base (3)..(3): a, c, g, t, unknown or other
  modified_base (6)..(6): a, c, g, t, unknown or other
  modified_base (18)..(18): a, c, g, t, unknown or other
gcngcncarcarcargcncar

SEQ ID NO: 4185 - DNA, 21 bp, Artificial Sequence
  Description of Artificial Sequence: Synthetic oligonucleotide
  modified_base (3)..(3): a, c, g, t, unknown or other
  modified_base (6)..(6): a, c, g, t, unknown or other
  modified_base (21)..(21): a, c, g, t, unknown or other
gcngcncarcarcarcargcn

SEQ ID NO: 4186 - DNA, 21 bp, Artificial Sequence
  Description of Artificial Sequence: Synthetic oligonucleotide
  modified_base (6)..(6): a, c, g, t, unknown or other
  modified_base (9)..(9): a, c, g, t, unknown or other
  modified_base (12)..(12): a, c, g, t, unknown or other
cargcngcngcncarcarcar

SEQ ID NO: 4187 - DNA, 21 bp, Artificial Sequence
  Description of Artificial Sequence: Synthetic oligonucleotide
  modified_base (6)..(6): a, c, g, t, unknown or other
  modified_base (9)..(9): a, c, g, t, unknown or other
  modified_base (15)..(15): a, c, g, t, unknown or other
cargcngcncargcncarcar

SEQ ID NO: 4188 - DNA, 21 bp, Artificial Sequence
  Description of Artificial Sequence: Synthetic oligonucleotide
  modified_base (6)..(6): a, c, g, t, unknown or other
  modified_base (9)..(9): a, c, g, t, unknown or other
  modified_base (18)..(18): a, c, g, t, unknown or other
cargcngcncarcargcncar

SEQ ID NO: 4189 - DNA, 21 bp, Artificial Sequence
  Description of Artificial Sequence: Synthetic oligonucleotide
  modified_base (6)..(6): a, c, g, t, unknown or other
  modified_base (9)..(9): a, c, g, t, unknown or other
  modified_base (21)..(21): a, c, g, t, unknown or other
cargcngcncarcarcargcn

SEQ ID NO: 4190 - DNA, 21 bp, Artificial Sequence
  Description of Artificial Sequence: Synthetic oligonucleotide
  modified_base (6)..(6): a, c, g, t, unknown or other
  modified_base (12)..(12): a, c, g, t, unknown or other
  modified_base (15)..(15): a, c, g, t, unknown or other
cargcncargcngcncarcar

SEQ ID NO: 4191 - DNA, 21 bp, Artificial Sequence
  Description of Artificial Sequence: Synthetic oligonucleotide
  modified_base (6)..(6): a, c, g, t, unknown or other
  modified_base (15)..(15): a, c, g, t, unknown or other
  modified_base (18)..(18): a, c, g, t, unknown or other
cargcncarcargcngcncar

SEQ ID NO: 4192 - DNA, 21 bp, Artificial Sequence
  Description of Artificial Sequence: Synthetic oligonucleotide
  modified_base (6)..(6): a, c, g, t, unknown or other
  modified_base (18)..(18): a, c, g, t, unknown or other
  modified_base (21)..(21): a, c, g, t, unknown or other
cargcncarcarcargcngcn

SEQ ID NO: 4193 - DNA, 21 bp, Artificial Sequence
  Description of Artificial Sequence: Synthetic oligonucleotide
  modified_base (6)..(6): a, c, g, t, unknown or other
  modified_base (12)..(12): a, c, g, t, unknown or other
  modified_base (18)..(18): a, c, g, t, unknown or other
cargcncargcncargcncar

SEQ ID NO: 4194 - DNA, 21 bp, Artificial Sequence
  Description of Artificial Sequence: Synthetic oligonucleotide
  modified_base (6)..(6): a, c, g, t, unknown or other
  modified_base (12)..(12): a, c, g, t, unknown or other
  modified_base (21)..(21): a, c, g, t, unknown or other
cargcncargcncarcargcn

SEQ ID NO: 4195 - DNA, 21 bp, Artificial Sequence
  Description of Artificial Sequence: Synthetic oligonucleotide
  modified_base (6)..(6): a, c, g, t, unknown or other
  modified_base (15)..(15): a, c, g, t, unknown or other
  modified_base (21)..(21): a, c, g, t, unknown or other
cargcncarcargcncargcn

SEQ ID NO: 4196 - DNA, 21 bp, Artificial Sequence
  Description of Artificial Sequence: Synthetic oligonucleotide
  modified_base (9)..(9): a, c, g, t, unknown or other
  modified_base (12)..(12): a, c, g, t, unknown or other
  modified_base (15)..(15): a, c, g, t, unknown or other
carcargcngcngcncarcar

SEQ ID NO: 4197 - DNA, 21 bp, Artificial Sequence
  Description of Artificial Sequence: Synthetic oligonucleotide
  modified_base (9)..(9): a, c, g, t, unknown or other
  modified_base (12)..(12): a, c, g, t, unknown or other
  modified_base (18)..(18): a, c, g, t, unknown or other
carcargcngcncargcncar

SEQ ID NO: 4198 - DNA, 21 bp, Artificial Sequence
  Description of Artificial Sequence: Synthetic oligonucleotide
  modified_base (9)..(9): a, c, g, t, unknown or other
  modified_base (12)..(12): a, c, g, t, unknown or other
  modified_base (21)..(21): a, c, g, t, unknown or other
carcargcngcncarcargcn

SEQ ID NO: 4199 - DNA, 21 bp, Artificial Sequence
  Description of Artificial Sequence: Synthetic oligonucleotide
  modified_base (9)..(9): a, c, g, t, unknown or other
  modified_base (15)..(15): a, c, g, t, unknown or other
  modified_base (18)..(18): a, c, g, t, unknown or other
carcargcncargcngcncar

SEQ ID NO: 4200 - DNA, 21 bp, Artificial Sequence
  Description of Artificial Sequence: Synthetic oligonucleotide
  modified_base (9)..(9): a, c, g, t, unknown or other
  modified_base (15)..(15): a, c, g, t, unknown or other
  modified_base (21)..(21): a, c, g, t, unknown or other
carcargcncargcncargcn

SEQ ID NO: 4201 - DNA, 21 bp, Artificial Sequence
  Description of Artificial Sequence: Synthetic oligonucleotide
  modified_base (9)..(9): a, c, g, t, unknown or other
  modified_base (18)..(18): a, c, g, t, unknown or other
  modified_base (21)..(21): a, c, g, t, unknown or other
carcargcncarcargcngcn

SEQ ID NO: 4202 - DNA, 21 bp, Artificial Sequence
  Description of Artificial Sequence: Synthetic oligonucleotide
  modified_base (12)..(12): a, c, g, t, unknown or other
  modified_base (15)..(15): a, c, g, t, unknown or other
  modified_base (18)..(18): a, c, g, t, unknown or other
carcarcargcngcngcncar

SEQ ID NO: 4203 - DNA, 21 bp, Artificial Sequence
  Description of Artificial Sequence: Synthetic oligonucleotide
  modified_base (12)..(12): a, c, g, t, unknown or other
  modified_base (15)..(15): a, c, g, t, unknown or other
  modified_base (21)..(21): a, c, g, t, unknown or other
carcarcargcngcncargcn

SEQ ID NO: 4204 - DNA, 21 bp, Artificial Sequence
  Description of Artificial Sequence: Synthetic oligonucleotide
  modified_base (12)..(12): a, c, g, t, unknown or other
  modified_base (18)..(18): a, c, g, t, unknown or other
  modified_base (21)..(21): a, c, g, t, unknown or other
carcarcargcncargcngcn

SEQ ID NO: 4205 - DNA, 21 bp, Artificial Sequence
  Description of Artificial Sequence: Synthetic oligonucleotide
  modified_base (18)..(18): a, c, g, t, unknown or other
  modified_base (21)..(21): a, c, g, t, unknown or other
carcarcarcarcargcngcn

SEQ ID NO: 4206 - DNA, 21 bp, Artificial Sequence
  Description of Artificial Sequence: Synthetic oligonucleotide
  modified_base (3)..(3): a, c, g, t, unknown or other
  modified_base (6)..(6): a, c, g, t, unknown or other
gcngcncarcarcarcarcar

SEQ ID NO: 4207 - DNA, 21 bp, Artificial Sequence
  Description of Artificial Sequence: Synthetic oligonucleotide
  modified_base (3)..(3): a, c, g, t, unknown or other
  modified_base (9)..(9): a, c, g, t, unknown or other
gcncargcncarcarcarcar

SEQ ID NO: 4208 - DNA, 21 bp, Artificial Sequence
  Description of Artificial Sequence: Synthetic oligonucleotide
  modified_base (3)..(3): a, c, g, t, unknown or other
  modified_base (12)..(12): a, c, g, t, unknown or other
gcncarcargcncarcarcar

SEQ ID NO: 4209 - DNA, 21 bp, Artificial Sequence
  Description of Artificial Sequence: Synthetic oligonucleotide
  modified_base (3)..(3): a, c, g, t, unknown or other
  modified_base (15)..(15): a, c, g, t, unknown or other
gcncarcarcargcncarcar

SEQ ID NO: 4210 - DNA, 21 bp, Artificial Sequence
  Description of Artificial Sequence: Synthetic oligonucleotide
  modified_base (3)..(3): a, c, g, t, unknown or other
  modified_base (18)..(18): a, c, g, t, unknown or other
gcncarcarcarcargcncar

SEQ ID NO: 4211 - DNA, 21 bp, Artificial Sequence
  Description of Artificial Sequence: Synthetic oligonucleotide
  modified_base (3)..(3): a, c, g, t, unknown or other
  modified_base (21)..(21): a, c, g, t, unknown or other
gcncarcarcarcarcargcn

SEQ ID NO: 4212 - DNA, 21 bp, Artificial Sequence
  Description of Artificial Sequence: Synthetic oligonucleotide
  modified_base (6)..(6): a, c, g, t, unknown or other
  modified_base (9)..(9): a, c, g, t, unknown or other
cargcngcncarcarcarcar

SEQ ID NO: 4213 - DNA, 21 bp, Artificial Sequence
  Description of Artificial Sequence: Synthetic oligonucleotide
  modified_base (6)..(6): a, c, g, t, unknown or other
  modified_base (12)..(12): a, c, g, t, unknown or other
cargcncargcncarcarcar

SEQ ID NO: 4214 - DNA, 21 bp, Artificial Sequence
  Description of Artificial Sequence: Synthetic oligonucleotide
  modified_base (6)..(6): a, c, g, t, unknown or other
  modified_base (15)..(15): a, c, g, t, unknown or other
cargcncarcargcncarcar

SEQ ID NO: 4215 - DNA, 21 bp, Artificial Sequence
  Description of Artificial Sequence: Synthetic oligonucleotide
  modified_base (6)..(6): a, c, g, t, unknown or other
  modified_base (18)..(18): a, c, g, t, unknown or other
cargcncarcarcargcncar

SEQ ID NO: 4216 - DNA, 21 bp, Artificial Sequence
  Description of Artificial Sequence: Synthetic oligonucleotide
  modified_base (6)..(6): a, c, g, t, unknown or other
  modified_base (21)..(21): a, c, g, t, unknown or other
cargcncarcarcarcargcn

SEQ ID NO: 4217 - DNA, 21 bp, Artificial Sequence
  Description of Artificial Sequence: Synthetic oligonucleotide
  modified_base (9)..(9): a, c, g, t, unknown or other
  modified_base (12)..(12): a, c, g, t, unknown or other
carcargcngcncarcarcar

SEQ ID NO: 4218 - DNA, 21 bp, Artificial Sequence
  Description of Artificial Sequence: Synthetic oligonucleotide
  modified_base (9)..(9): a, c, g, t, unknown or other
  modified_base (15)..(15): a, c, g, t, unknown or other
carcargcncargcncarcar

SEQ ID NO: 4219 - DNA, 21 bp, Artificial Sequence
  Description of Artificial Sequence: Synthetic oligonucleotide
  modified_base (9)..(9): a, c, g, t, unknown or other
  modified_base (18)..(18): a, c, g, t, unknown or other
carcargcncarcargcncar

SEQ ID NO: 4220 - DNA, 21 bp, Artificial Sequence
  Description of Artificial Sequence: Synthetic oligonucleotide
  modified_base (9)..(9): a, c, g, t, unknown or other
  modified_base (21)..(21): a, c, g, t, unknown or other
carcargcncarcarcargcn

SEQ ID NO: 4221 - DNA, 21 bp, Artificial Sequence
  Description of Artificial Sequence: Synthetic oligonucleotide
  modified_base (12)..(12): a, c, g, t, unknown or other
  modified_base (15)..(15): a, c, g, t, unknown or other
carcarcargcngcncarcar

SEQ ID NO: 4222 - DNA, 21 bp, Artificial Sequence
  Description of Artificial Sequence: Synthetic oligonucleotide
  modified_base (12)..(12): a, c, g, t, unknown or other
  modified_base (18)..(18): a, c, g, t, unknown or other
carcarcargcncargcncar

SEQ ID NO: 4223 - DNA, 21 bp, Artificial Sequence
  Description of Artificial Sequence: Synthetic oligonucleotide
  modified_base (12)..(12): a, c, g, t, unknown or other
  modified_base (21)..(21): a, c, g, t, unknown or other
carcarcargcncarcargcn

SEQ ID NO: 4224 - DNA, 21 bp, Artificial Sequence
  Description of Artificial Sequence: Synthetic oligonucleotide
  modified_base (15)..(15): a, c, g, t, unknown or other
  modified_base (18)..(18): a, c, g, t, unknown or other
carcarcarcargcngcncar

SEQ ID NO: 4225 - DNA, 21 bp, Artificial Sequence
  Description of Artificial Sequence: Synthetic oligonucleotide
  modified_base (15)..(15): a, c, g, t, unknown or other
  modified_base (21)..(21): a, c, g, t, unknown or other
carcarcarcargcncargcn

SEQ ID NO: 4226 - DNA, 21 bp, Artificial Sequence
  Description of Artificial Sequence: Synthetic oligonucleotide
  modified_base (21)..(21): a, c, g, t, unknown or other
carcarcarcarcarcargcn

SEQ ID NO: 4227 - DNA, 21 bp, Artificial Sequence
  Description of Artificial Sequence: Synthetic oligonucleotide
  modified_base (3)..(3): a, c, g, t, unknown or other
gcncarcarcarcarcarcar

SEQ ID NO: 4228 - DNA, 21 bp, Artificial Sequence
  Description of Artificial Sequence: Synthetic oligonucleotide
  modified_base (6)..(6): a, c, g, t, unknown or other
cargcncarcarcarcarcar

SEQ ID NO: 4229 - DNA, 21 bp, Artificial Sequence
  Description of Artificial Sequence: Synthetic oligonucleotide
  modified_base (9)..(9): a, c, g, t, unknown or other
carcargcncarcarcarcar

SEQ ID NO: 4230 - DNA, 21 bp, Artificial Sequence
  Description of Artificial Sequence: Synthetic oligonucleotide
  modified_base (12)..(12): a, c, g, t, unknown or other
carcarcargcncarcarcar

SEQ ID NO: 4231 - DNA, 21 bp, Artificial Sequence
  Description of Artificial Sequence: Synthetic oligonucleotide
  modified_base (15)..(15): a, c, g, t, unknown or other
carcarcarcargcncarcar

SEQ ID NO: 4232 - DNA, 21 bp, Artificial Sequence
  Description of Artificial Sequence: Synthetic oligonucleotide
  modified_base (18)..(18): a, c, g, t, unknown or other
carcarcarcarcargcncar

SEQ ID NO: 4233 - DNA, 12 bp, Artificial Sequence
  Description of Artificial Sequence: Synthetic oligonucleotide
carcarcaragy

SEQ ID NO: 4234 - DNA, 12 bp, Artificial Sequence
  Description of Artificial Sequence: Synthetic oligonucleotide
agycarcarcar

SEQ ID NO: 4235 - DNA, 12 bp, Artificial Sequence
  Description of Artificial Sequence: Synthetic oligonucleotide
caragycarcar

SEQ ID NO: 4236 - DNA, 12 bp, Artificial Sequence
  Description of Artificial Sequence: Synthetic oligonucleotide
carcaragycar

SEQ ID NO: 4237 - DNA, 15 bp, Artificial Sequence
  Description of Artificial Sequence: Synthetic oligonucleotide
carcarcarcaragy

SEQ ID NO: 4238 - DNA, 15 bp, Artificial Sequence
  Description of Artificial Sequence: Synthetic oligonucleotide
agycarcarcarcar

SEQ ID NO: 4239 - DNA, 15 bp, Artificial Sequence
  Description of Artificial Sequence: Synthetic oligonucleotide
caragycarcarcar

SEQ ID NO: 4240 - DNA, 15 bp, Artificial Sequence
  Description of Artificial Sequence: Synthetic oligonucleotide
carcaragycarcar

SEQ ID NO: 4241 - DNA, 15 bp, Artificial Sequence
  Description of Artificial Sequence: Synthetic oligonucleotide
carcarcaragycar

SEQ ID NO: 4242 - DNA, 15 bp, Artificial Sequence
  Description of Artificial Sequence: Synthetic oligonucleotide
carcarcaragyagy

SEQ ID NO: 4243 - DNA, 15 bp, Artificial Sequence
  Description of Artificial Sequence: Synthetic oligonucleotide
agyagycarcarcar

SEQ ID NO: 4244 - DNA, 15 bp, Artificial Sequence
  Description of Artificial Sequence: Synthetic oligonucleotide
agycaragycarcar

SEQ ID NO: 4245 - DNA, 15 bp, Artificial Sequence
  Description of Artificial Sequence: Synthetic oligonucleotide
agycarcaragycar

SEQ ID NO: 4246 - DNA, 15 bp, Artificial Sequence
  Description of Artificial Sequence: Synthetic oligonucleotide
agycarcarcaragy

SEQ ID NO: 4247 - DNA, 15 bp, Artificial Sequence
  Description of Artificial Sequence: Synthetic oligonucleotide
caragyagycarcar

SEQ ID NO: 4248 - DNA, 15 bp, Artificial Sequence
  Description of Artificial Sequence: Synthetic oligonucleotide
caragycaragycar

SEQ ID NO: 4249 - DNA, 15 bp, Artificial Sequence
  Description of Artificial Sequence: Synthetic oligonucleotide
caragycarcaragy

SEQ ID NO: 4250 - DNA, 15 bp, Artificial Sequence
  Description of Artificial Sequence: Synthetic oligonucleotide
carcaragyagycar

SEQ ID NO: 4251 - DNA, 15 bp, Artificial Sequence
  Description of Artificial Sequence: Synthetic oligonucleotide
carcaragycaragy

SEQ ID NO: 4252 - DNA, 18 bp, Artificial Sequence
  Description of Artificial Sequence: Synthetic oligonucleotide
carcarcarcarcaragy

SEQ ID NO: 4253 - DNA, 18 bp, Artificial Sequence
  Description of Artificial Sequence: Synthetic oligonucleotide
agycarcarcarcarcar

SEQ ID NO: 4254 - DNA, 18 bp, Artificial Sequence
  Description of Artificial Sequence: Synthetic oligonucleotide
caragycarcarcarcar

SEQ ID NO: 4255 - DNA, 18 bp, Artificial Sequence
  Description of Artificial Sequence: Synthetic oligonucleotide
carcaragycarcarcar

SEQ ID NO: 4256 - DNA, 18 bp, Artificial Sequence
  Description of Artificial Sequence: Synthetic oligonucleotide
carcarcaragycarcar

SEQ ID NO: 4257 - DNA, 18 bp, Artificial Sequence
  Description of Artificial Sequence: Synthetic oligonucleotide
carcarcarcaragycar

SEQ ID NO: 4258 - DNA, 18 bp, Artificial Sequence
  Description of Artificial Sequence: Synthetic oligonucleotide
carcarcarcaragyagy

SEQ ID NO: 4259 - DNA, 18 bp, Artificial Sequence
  Description of Artificial Sequence: Synthetic oligonucleotide
agyagycarcarcarcar

SEQ ID NO: 4260 - DNA, 18 bp, Artificial Sequence
  Description of Artificial Sequence: Synthetic oligonucleotide
agycaragycarcarcar

SEQ ID NO: 4261 - DNA, 18 bp, Artificial Sequence
  Description of Artificial Sequence: Synthetic oligonucleotide
agycarcaragycarcar

SEQ ID NO: 4262 - DNA, 18 bp, Artificial Sequence
  Description of Artificial Sequence: Synthetic oligonucleotide
agycarcarcaragycar

SEQ ID NO: 4263 - DNA, 18 bp, Artificial Sequence
  Description of Artificial Sequence: Synthetic oligonucleotide
agycarcarcarcaragy

SEQ ID NO: 4264 - DNA, 18 bp, Artificial Sequence
  Description of Artificial Sequence: Synthetic oligonucleotide
caragyagycarcarcar

SEQ ID NO: 4265 - DNA, 18 bp, Artificial Sequence
  Description of Artificial Sequence: Synthetic oligonucleotide
caragycaragycarcar

SEQ ID NO: 4266 - DNA, 18 bp, Artificial Sequence
  Description of Artificial Sequence: Synthetic oligonucleotide
caragycarcaragycar

SEQ ID NO: 4267 - DNA, 18 bp, Artificial Sequence
  Description of Artificial Sequence: Synthetic oligonucleotide
caragycarcarcaragy

SEQ ID NO: 4268 - DNA, 18 bp, Artificial Sequence
  Description of Artificial Sequence: Synthetic oligonucleotide
carcaragyagycarcar

SEQ ID NO: 4269 - DNA, 18 bp, Artificial Sequence
  Description of Artificial Sequence: Synthetic oligonucleotide
carcaragycaragycar

SEQ ID NO: 4270 - DNA, 18 bp, Artificial Sequence
  Description of Artificial Sequence: Synthetic oligonucleotide
carcaragycarcaragy

SEQ ID NO: 4271 - DNA, 18 bp, Artificial Sequence
  Description of Artificial Sequence: Synthetic oligonucleotide
carcarcaragyagycar

SEQ ID NO: 4272 - DNA, 18 bp, Artificial Sequence
  Description of Artificial Sequence: Synthetic oligonucleotide
carcarcaragycaragy

SEQ ID NO: 4273 - DNA, 21 bp, Artificial Sequence
  Description of Artificial Sequence: Synthetic oligonucleotide
carcarcarcaragyagyagy

SEQ ID NO: 4274 - DNA, 21 bp, Artificial Sequence
  Description of Artificial Sequence: Synthetic oligonucleotide
agyagyagycarcarcarcar

SEQ ID NO: 4275 - DNA, 21 bp, Artificial Sequence
  Description of Artificial Sequence: Synthetic oligonucleotide
agycaragyagycarcarcar

SEQ ID NO: 4276 - DNA, 21 bp, Artificial Sequence
  Description of Artificial Sequence: Synthetic oligonucleotide
agycaragycaragycarcar

SEQ ID NO: 4277 - DNA, 21 bp, Artificial Sequence
  Description of Artificial Sequence: Synthetic oligonucleotide
agycaragycarcaragycar

SEQ ID NO: 4278 - DNA, 21 bp, Artificial Sequence
  Description of Artificial Sequence: Synthetic oligonucleotide
agycaragycarcarcaragy

SEQ ID NO: 4279 - DNA, 21 bp, Artificial Sequence
  Description of Artificial Sequence: Synthetic oligonucleotide
agycarcaragyagycarcar

SEQ ID NO: 4280 - DNA, 21 bp, Artificial Sequence
  Description of Artificial Sequence: Synthetic oligonucleotide
agycarcaragycaragycar

SEQ ID NO: 4281 - DNA, 21 bp, Artificial Sequence
  Description of Artificial Sequence: Synthetic oligonucleotide
agycarcaragycarcaragy

SEQ ID NO: 4282 - DNA, 21 bp, Artificial Sequence
  Description of Artificial Sequence: Synthetic oligonucleotide
agycarcarcaragycaragy

SEQ ID NO: 4283 - DNA, 21 bp, Artificial Sequence
  Description of Artificial Sequence: Synthetic oligonucleotide
agycarcarcaragyagycar

SEQ ID NO: 4284 - DNA, 21 bp, Artificial Sequence
  Description of Artificial Sequence: Synthetic oligonucleotide
agycarcarcarcaragyagy

SEQ ID NO: 4285 - DNA, 21 bp, Artificial Sequence
  Description of Artificial Sequence: Synthetic oligonucleotide
agyagycaragycarcarcar

SEQ ID NO: 4286 - DNA, 21 bp, Artificial Sequence
  Description of Artificial Sequence: Synthetic oligonucleotide
agyagycarcaragycarcar

SEQ ID NO: 4287 - DNA, 21 bp, Artificial Sequence
  Description of Artificial Sequence: Synthetic oligonucleotide
agyagycarcarcaragycar

SEQ ID NO: 4288 - DNA, 21 bp, Artificial Sequence
  Description of Artificial Sequence: Synthetic oligonucleotide
agyagycarcarcarcaragy

SEQ ID NO: 4289 - DNA, 21 bp, Artificial Sequence
  Description of Artificial Sequence: Synthetic oligonucleotide
caragyagyagycarcarcar

SEQ ID NO: 4290 - DNA, 21 bp, Artificial Sequence
  Description of Artificial Sequence: Synthetic oligonucleotide
caragyagycaragycarcar

SEQ ID NO: 4291 - DNA, 21 bp, Artificial Sequence
  Description of Artificial Sequence: Synthetic oligonucleotide
caragyagycarcaragycar

SEQ ID NO: 4292 - DNA, 21 bp, Artificial Sequence
  Description of Artificial Sequence: Synthetic oligonucleotide
caragyagycarcarcaragy

SEQ ID NO: 4293 - DNA, 21 bp, Artificial Sequence
  Description of Artificial Sequence: Synthetic oligonucleotide
caragycaragyagycarcar

SEQ ID NO: 4294 - DNA, 21 bp, Artificial Sequence
  Description of Artificial Sequence: Synthetic oligonucleotide
caragycarcaragyagycar

SEQ ID NO: 4295 - DNA, 21 bp, Artificial Sequence
  Description of Artificial Sequence: Synthetic oligonucleotide
caragycarcarcaragyagy

SEQ ID NO: 4296 - DNA, 21 bp, Artificial Sequence
  Description of Artificial Sequence: Synthetic oligonucleotide
caragycaragycaragycar

SEQ ID NO: 4297 - DNA, 21 bp, Artificial Sequence
  Description of Artificial Sequence: Synthetic oligonucleotide
caragycaragycarcaragy

SEQ ID NO: 4298 - DNA, 21 bp, Artificial Sequence
  Description of Artificial Sequence: Synthetic oligonucleotide
caragycarcaragycaragy

SEQ ID NO: 4299 - DNA, 21 bp, Artificial Sequence
  Description of Artificial Sequence: Synthetic oligonucleotide
carcaragyagyagycarcar

SEQ ID NO: 4300 - DNA, 21 bp, Artificial Sequence
  Description of Artificial Sequence: Synthetic oligonucleotide
carcaragyagycaragycar

SEQ ID NO: 4301 - DNA, 21 bp, Artificial Sequence
  Description of Artificial Sequence: Synthetic oligonucleotide
carcaragyagycarcaragy

SEQ ID NO: 4302 - DNA, 21 bp, Artificial Sequence
  Description of Artificial Sequence: Synthetic oligonucleotide
carcaragycaragyagycar

SEQ ID NO: 4303 - DNA, 21 bp, Artificial Sequence
  Description of Artificial Sequence: Synthetic oligonucleotide
carcaragycaragycaragy

SEQ ID NO: 4304 - DNA, 21 bp, Artificial Sequence
  Description of Artificial Sequence: Synthetic oligonucleotide
carcaragycarcaragyagy

SEQ ID NO: 4305 - DNA, 21 bp, Artificial Sequence
  Description of Artificial Sequence: Synthetic oligonucleotide
carcarcaragyagyagycar

SEQ ID NO: 4306 - DNA, 21 bp, Artificial Sequence
  Description of Artificial Sequence: Synthetic oligonucleotide
carcarcaragyagycaragy

SEQ ID NO: 4307 - DNA, 21 bp, Artificial Sequence
  Description of Artificial Sequence: Synthetic oligonucleotide
carcarcaragycaragyagy

SEQ ID NO: 4308 - DNA, 21 bp, Artificial Sequence
  Description of Artificial Sequence: Synthetic oligonucleotide
carcarcarcarcaragyagy

SEQ ID NO: 4309 - DNA, 21 bp, Artificial Sequence
  Description of Artificial Sequence: Synthetic oligonucleotide
agyagycarcarcarcarcar

SEQ ID NO: 4310 - DNA, 21 bp, Artificial Sequence
  Description of Artificial Sequence: Synthetic oligonucleotide
agycaragycarcarcarcar

SEQ ID NO: 4311 - DNA, 21 bp, Artificial Sequence
  Description of Artificial Sequence: Synthetic oligonucleotide
agycarcaragycarcarcar

SEQ ID NO: 4312 - DNA, 21 bp, Artificial Sequence
  Description of Artificial Sequence: Synthetic oligonucleotide
agycarcarcaragycarcar

SEQ ID NO: 4313 - DNA, 21 bp, Artificial Sequence
  Description of Artificial Sequence: Synthetic oligonucleotide
agycarcarcarcaragycar

SEQ ID NO: 4314 - DNA, 21 bp, Artificial Sequence
  Description of Artificial Sequence: Synthetic oligonucleotide
agycarcarcarcarcaragy

SEQ ID NO: 4315 - DNA, 21 bp, Artificial Sequence
  Description of Artificial Sequence: Synthetic oligonucleotide
caragyagycarcarcarcar

SEQ ID NO: 4316 - DNA, 21 bp, Artificial Sequence
  Description of Artificial Sequence: Synthetic oligonucleotide
caragycaragycarcarcar

SEQ ID NO: 4317 - DNA, 21 bp, Artificial Sequence
  Description of Artificial Sequence: Synthetic oligonucleotide
caragycarcaragycarcar

SEQ ID NO: 4318 - DNA, 21 bp, Artificial Sequence
  Description of Artificial Sequence: Synthetic oligonucleotide
caragycarcarcaragycar

SEQ ID NO: 4319 - DNA, 21 bp, Artificial Sequence
  Description of Artificial Sequence: Synthetic oligonucleotide
caragycarcarcarcaragy

SEQ ID NO: 4320 - DNA, 21 bp, Artificial Sequence
  Description of Artificial Sequence: Synthetic oligonucleotide
carcaragyagycarcarcar

SEQ ID NO: 4321 - DNA, 21 bp, Artificial Sequence
  Description of Artificial Sequence: Synthetic oligonucleotide
carcaragycaragycarcar

SEQ ID NO: 4322 - DNA, 21 bp, Artificial Sequence
  Description of Artificial Sequence: Synthetic oligonucleotide
carcaragycarcaragycar

SEQ ID NO: 4323 - DNA, 21 bp, Artificial Sequence
  Description of Artificial Sequence: Synthetic oligonucleotide
carcaragycarcarcaragy

SEQ ID NO: 4324 - DNA, 21 bp, Artificial Sequence
  Description of Artificial Sequence: Synthetic oligonucleotide
carcarcaragyagycarcar

SEQ ID NO: 4325 - DNA, 21 bp, Artificial Sequence
  Description of Artificial Sequence: Synthetic oligonucleotide
carcarcaragycaragycar

SEQ ID NO: 4326 - DNA, 21 bp, Artificial Sequence
  Description of Artificial Sequence: Synthetic oligonucleotide
carcarcaragycarcaragy

SEQ ID NO: 4327 - DNA, 21 bp, Artificial Sequence
  Description of Artificial Sequence: Synthetic oligonucleotide
carcarcarcaragyagycar

SEQ ID NO: 4328 - DNA, 21 bp, Artificial Sequence
  Description of Artificial Sequence: Synthetic oligonucleotide
carcarcarcaragycaragy

SEQ ID NO: 4329 - DNA, 21 bp, Artificial Sequence
  Description of Artificial Sequence: Synthetic oligonucleotide
carcarcarcarcarcaragy

SEQ ID NO: 4330 - DNA, 21 bp, Artificial Sequence
  Description of Artificial Sequence: Synthetic oligonucleotide
agycarcarcarcarcarcar

SEQ ID NO: 4331 - DNA, 21 bp, Artificial Sequence
  Description of Artificial Sequence: Synthetic oligonucleotide
caragycarcarcarcarcar

SEQ ID NO: 4332 - DNA, 21 bp, Artificial Sequence
  Description of Artificial Sequence: Synthetic oligonucleotide
carcaragycarcarcarcar

SEQ ID NO: 4333 - DNA, 21 bp, Artificial Sequence
  Description of Artificial Sequence: Synthetic oligonucleotide
carcarcaragycarcarcar

SEQ ID NO: 4334 - DNA, 21 bp, Artificial Sequence
  Description of Artificial Sequence: Synthetic oligonucleotide
carcarcarcaragycarcar

SEQ ID NO: 4335 - DNA, 21 bp, Artificial Sequence
  Description of Artificial Sequence: Synthetic oligonucleotide
carcarcarcarcaragycar

SEQ ID NO: 4336 - DNA, 12 bp, Artificial Sequence
  Description of Artificial Sequence: Synthetic oligonucleotide
carcarcargar

SEQ ID NO: 4337 - DNA, 12 bp, Artificial Sequence
  Description of Artificial Sequence: Synthetic oligonucleotide
garcarcarcar

SEQ ID NO: 4338 - DNA, 12 bp, Artificial Sequence
  Description of Artificial Sequence: Synthetic oligonucleotide
cargarcarcar

SEQ ID NO: 4339 - DNA, 12 bp, Artificial Sequence
  Description of Artificial Sequence: Synthetic oligonucleotide
carcargarcar

SEQ ID NO: 4340 - DNA, 15 bp, Artificial Sequence
  Description of Artificial Sequence: Synthetic oligonucleotide
carcarcarcargar

SEQ ID NO: 4341 - DNA, 15 bp, Artificial Sequence
  Description of Artificial Sequence: Synthetic oligonucleotide
garcarcarcarcar

SEQ ID NO: 4342 - DNA, 15 bp, Artificial Sequence
  Description of Artificial Sequence: Synthetic oligonucleotide
cargarcarcarcar

SEQ ID NO: 4343 - DNA, 15 bp, Artificial Sequence
  Description of Artificial Sequence: Synthetic oligonucleotide
carcargarcarcar

SEQ ID NO: 4344 - DNA, 15 bp, Artificial Sequence
  Description of Artificial Sequence: Synthetic oligonucleotide
carcarcargarcar

SEQ ID NO: 4345 - DNA, 15 bp, Artificial Sequence
  Description of Artificial Sequence: Synthetic oligonucleotide
carcarcargargar

SEQ ID NO: 4346 - DNA, 15 bp, Artificial Sequence
  Description of Artificial Sequence: Synthetic oligonucleotide
gargarcarcarcar

SEQ ID NO: 4347 - DNA, 15 bp, Artificial Sequence
  Description of Artificial Sequence: Synthetic oligonucleotide
garcargarcarcar

SEQ ID NO: 4348 - DNA, 15 bp, Artificial Sequence
  Description of Artificial Sequence: Synthetic oligonucleotide
garcarcargarcar

SEQ ID NO: 4349 - DNA, 15 bp, Artificial Sequence
  Description of Artificial Sequence: Synthetic oligonucleotide
garcarcarcargar

SEQ ID NO: 4350 - DNA, 15 bp, Artificial Sequence
  Description of Artificial Sequence: Synthetic oligonucleotide
cargargarcarcar

SEQ ID NO: 4351 - DNA, 15 bp, Artificial Sequence
  Description of Artificial Sequence: Synthetic oligonucleotide
cargarcargarcar

SEQ ID NO: 4352 - DNA, 15 bp, Artificial Sequence
  Description of Artificial Sequence: Synthetic oligonucleotide
cargarcarcargar

SEQ ID NO: 4353 - DNA, 15 bp, Artificial Sequence
  Description of Artificial Sequence: Synthetic oligonucleotide
carcargargarcar

SEQ ID NO: 4354 - DNA, 15 bp, Artificial Sequence
  Description of Artificial Sequence: Synthetic oligonucleotide
carcargarcargar

SEQ ID NO: 4355 - DNA, 18 bp, Artificial Sequence
  Description of Artificial Sequence: Synthetic oligonucleotide
carcarcarcarcargar

SEQ ID NO: 4356 - DNA, 18 bp, Artificial Sequence
  Description of Artificial Sequence: Synthetic oligonucleotide
garcarcarcarcarcar

SEQ ID NO: 4357 - DNA, 18 bp, Artificial Sequence
  Description of Artificial Sequence: Synthetic oligonucleotide
cargarcarcarcarcar

SEQ ID NO: 4358 - DNA, 18 bp, Artificial Sequence
  Description of Artificial Sequence: Synthetic oligonucleotide
carcargarcarcarcar

SEQ ID NO: 4359 - DNA, 18 bp, Artificial Sequence
  Description of Artificial Sequence: Synthetic oligonucleotide
carcarcargarcarcar

SEQ ID NO: 4360 - DNA, 18 bp, Artificial Sequence
  Description of Artificial Sequence: Synthetic oligonucleotide
carcarcarcargarcar

SEQ ID NO: 4361 - DNA, 18 bp, Artificial Sequence
  Description of Artificial Sequence: Synthetic oligonucleotide
carcarcarcargargar

SEQ ID NO: 4362 - DNA, 18 bp, Artificial Sequence
  Description of Artificial Sequence: Synthetic oligonucleotide
gargarcarcarcarcar

SEQ ID NO: 4363 - DNA, 18 bp, Artificial Sequence
  Description of Artificial Sequence: Synthetic oligonucleotide
garcargarcarcarcar

SEQ ID NO: 4364 - DNA, 18 bp, Artificial Sequence
  Description of Artificial Sequence: Synthetic oligonucleotide
garcarcargarcarcar

SEQ ID NO: 4365 - DNA, 18 bp, Artificial Sequence
  Description of Artificial Sequence: Synthetic oligonucleotide
garcarcarcargarcar

SEQ ID NO: 4366 - DNA, 18 bp, Artificial Sequence
  Description of Artificial Sequence: Synthetic oligonucleotide
garcarcarcarcargar

SEQ ID NO: 4367 - DNA, 18 bp, Artificial Sequence
  Description of Artificial Sequence: Synthetic oligonucleotide
cargargarcarcarcar

SEQ ID NO: 4368 - DNA, 18 bp, Artificial Sequence
  Description of Artificial Sequence: Synthetic oligonucleotide
cargarcargarcarcar

SEQ ID NO: 4369 - DNA, 18 bp, Artificial Sequence
  Description of Artificial Sequence: Synthetic oligonucleotide
cargarcarcargarcar

SEQ ID NO: 4370 - DNA, 18 bp, Artificial Sequence
  Description of Artificial Sequence: Synthetic oligonucleotide
cargarcarcarcargar

SEQ ID NO: 4371 - DNA, 18 bp, Artificial Sequence
  Description of Artificial Sequence: Synthetic oligonucleotide
carcargargarcarcar

SEQ ID NO: 4372 - DNA, 18 bp, Artificial Sequence
  Description of Artificial Sequence: Synthetic oligonucleotide
carcargarcargarcar

SEQ ID NO: 4373 - DNA, 18 bp, Artificial Sequence
  Description of Artificial Sequence: Synthetic oligonucleotide
carcargarcarcargar

SEQ ID NO: 4374 - DNA, 18 bp, Artificial Sequence
  Description of Artificial Sequence: Synthetic oligonucleotide
carcarcargargarcar

SEQ ID NO: 4375 - DNA, 18 bp, Artificial Sequence
  Description of Artificial Sequence: Synthetic oligonucleotide
carcarcargarcargar

SEQ ID NO: 4376 - DNA, 21 bp, Artificial Sequence
  Description of Artificial Sequence: Synthetic oligonucleotide
carcarcarcargargargar

SEQ ID NO: 4377 - DNA, 21 bp, Artificial Sequence
  Description of Artificial Sequence: Synthetic oligonucleotide
gargargarcarcarcarcar

SEQ ID NO: 4378 - DNA, 21 bp, Artificial Sequence
  Description of Artificial Sequence: Synthetic oligonucleotide
garcargargarcarcarcar

SEQ ID NO: 4379 - DNA, 21 bp, Artificial Sequence
  Description of Artificial Sequence: Synthetic oligonucleotide
garcargarcargarcarcar

SEQ ID NO: 4380 - DNA, 21 bp, Artificial Sequence
  Description of Artificial Sequence: Synthetic oligonucleotide
garcargarcarcargarcar

SEQ ID NO: 4381 - DNA, 21 bp, Artificial Sequence
  Description of Artificial Sequence: Synthetic oligonucleotide
garcargarcarcarcargar

SEQ ID NO: 4382 - DNA, 21 bp, Artificial Sequence
  Description of Artificial Sequence: Synthetic oligonucleotide
garcarcargargarcarcar

SEQ ID NO: 4383 - DNA, 21 bp, Artificial Sequence
  Description of Artificial Sequence: Synthetic oligonucleotide
garcarcargarcargarcar

SEQ ID NO: 4384 - DNA, 21 bp, Artificial Sequence
  Description of Artificial Sequence: Synthetic oligonucleotide
garcarcargarcarcargar

SEQ ID NO: 4385 - DNA, 21 bp, Artificial Sequence
  Description of Artificial Sequence: Synthetic oligonucleotide
garcarcarcargarcargar

SEQ ID NO: 4386 - DNA, 21 bp, Artificial Sequence
  Description of Artificial Sequence: Synthetic oligonucleotide
garcarcarcargargarcar

SEQ ID NO: 4387 - DNA, 21 bp, Artificial Sequence
  Description of Artificial Sequence: Synthetic oligonucleotide
garcarcarcarcargargar

SEQ ID NO: 4388 - DNA, 21 bp, Artificial Sequence
  Description of Artificial Sequence: Synthetic oligonucleotide
gargarcargarcarcarcar

SEQ ID NO: 4389 - DNA, 21 bp, Artificial Sequence
  Description of Artificial Sequence: Synthetic oligonucleotide
gargarcarcargarcarcar

SEQ ID NO: 4390 - DNA, 21 bp, Artificial Sequence
  Description of Artificial Sequence: Synthetic oligonucleotide
gargarcarcarcargarcar

SEQ ID NO: 4391 - DNA, 21 bp, Artificial Sequence
  Description of Artificial Sequence: Synthetic oligonucleotide
gargarcarcarcarcargar

SEQ ID NO: 4392 - DNA, 21 bp, Artificial Sequence
  Description of Artificial Sequence: Synthetic oligonucleotide
cargargargarcarcarcar

SEQ ID NO: 4393 - DNA, 21 bp, Artificial Sequence
  Description of Artificial Sequence: Synthetic oligonucleotide
cargargarcargarcarcar

SEQ ID NO: 4394 - DNA, 21 bp, Artificial Sequence
  Description of Artificial Sequence: Synthetic oligonucleotide
cargargarcarcargarcar

SEQ ID NO: 4395 - DNA, 21 bp, Artificial Sequence
  Description of Artificial Sequence: Synthetic oligonucleotide
cargargarcarcarcargar

SEQ ID NO: 4396 - DNA, 21 bp, Artificial Sequence
  Description of Artificial Sequence: Synthetic oligonucleotide
cargarcargargarcarcar

SEQ ID NO: 4397 - DNA, 21 bp, Artificial Sequence
  Description of Artificial Sequence: Synthetic oligonucleotide
cargarcarcargargarcar

SEQ ID NO: 4398 - DNA, 21 bp, Artificial Sequence
  Description of Artificial Sequence: Synthetic oligonucleotide
cargarcarcarcargargar

SEQ ID NO: 4399 - DNA, 21 bp, Artificial Sequence
  Description of Artificial Sequence: Synthetic oligonucleotide
cargarcargarcargarcar

SEQ ID NO: 4400 - DNA, 21 bp, Artificial Sequence
  Description of Artificial Sequence: Synthetic oligonucleotide
cargarcargarcarcargar

SEQ ID NO: 4401 - DNA, 21 bp, Artificial Sequence
  Description of Artificial Sequence: Synthetic oligonucleotide
cargarcarcargarcargar

SEQ ID NO: 4402 - DNA, 21 bp, Artificial Sequence
  Description of Artificial Sequence: Synthetic oligonucleotide
carcargargargarcarcar

SEQ ID NO: 4403 - DNA, 21 bp, Artificial Sequence
  Description of Artificial Sequence: Synthetic oligonucleotide
carcargargarcargarcar

SEQ ID NO: 4404 - DNA, 21 bp, Artificial Sequence
  Description of Artificial Sequence: Synthetic oligonucleotide
carcargargarcarcargar

SEQ ID NO: 4405 - DNA, 21 bp, Artificial Sequence
  Description of Artificial Sequence: Synthetic oligonucleotide
carcargarcargargarcar

SEQ ID NO: 4406 - DNA, 21 bp, Artificial Sequence
  Description of Artificial Sequence: Synthetic oligonucleotide
carcargarcargarcargar

SEQ ID NO: 4407 - DNA, 21 bp, Artificial Sequence
  Description of Artificial Sequence: Synthetic oligonucleotide
carcargarcarcargargar

SEQ ID NO: 4408 - DNA, 21 bp, Artificial Sequence
  Description of Artificial Sequence: Synthetic oligonucleotide
carcarcargargargarcar

SEQ ID NO: 4409 - DNA, 21 bp, Artificial Sequence
  Description of Artificial Sequence: Synthetic oligonucleotide
carcarcargargarcargar

SEQ ID NO: 4410 - DNA, 21 bp, Artificial Sequence
  Description of Artificial Sequence: Synthetic oligonucleotide
carcarcargarcargargar

SEQ ID NO: 4411 - DNA, 21 bp, Artificial Sequence
  Description of Artificial Sequence: Synthetic oligonucleotide
carcarcarcarcargargar

SEQ ID NO: 4412 - DNA, 21 bp, Artificial Sequence
  Description of Artificial Sequence: Synthetic oligonucleotide
gargarcarcarcarcarcar

SEQ ID NO: 4413 - DNA, 21 bp, Artificial Sequence
  Description of Artificial Sequence: Synthetic oligonucleotide
garcargarcarcarcarcar

SEQ ID NO: 4414 - DNA, 21 bp, Artificial Sequence
  Description of Artificial Sequence: Synthetic oligonucleotide
garcarcargarcarcarcar

SEQ ID NO: 4415 - DNA, 21 bp, Artificial Sequence
  Description of Artificial Sequence: Synthetic oligonucleotide
garcarcarcargarcarcar

SEQ ID NO: 4416 - DNA, 21 bp, Artificial Sequence
  Description of Artificial Sequence: Synthetic oligonucleotide
garcarcarcarcargarcar

SEQ ID NO: 4417 - DNA, 21 bp, Artificial Sequence
  Description of Artificial Sequence: Synthetic oligonucleotide
garcarcarcarcarcargar

SEQ ID NO: 4418 - DNA, 21 bp, Artificial Sequence
  Description of Artificial Sequence: Synthetic oligonucleotide
cargargarcarcarcarcar

SEQ ID NO: 4419 - DNA, 21 bp, Artificial Sequence
  Description of Artificial Sequence: Synthetic oligonucleotide
cargarcargarcarcarcar

SEQ ID NO: 4420 - DNA, 21 bp, Artificial Sequence
  Description of Artificial Sequence: Synthetic oligonucleotide
cargarcarcargarcarcar

SEQ ID NO: 4421 - DNA, 21 bp, Artificial Sequence
  Description of Artificial Sequence: Synthetic oligonucleotide
cargarcarcarcargarcar

SEQ ID NO: 4422 - DNA, 21 bp, Artificial Sequence
  Description of Artificial Sequence: Synthetic oligonucleotide
cargarcarcarcarcargar

SEQ ID NO: 4423 - DNA, 21 bp, Artificial Sequence
  Description of Artificial Sequence: Synthetic oligonucleotide
carcargargarcarcarcar

SEQ ID NO: 4424 - DNA, 21 bp, Artificial Sequence
  Description of Artificial Sequence: Synthetic oligonucleotide
carcargarcargarcarcar

SEQ ID NO: 4425 - DNA, 21 bp, Artificial Sequence
  Description of Artificial Sequence: Synthetic oligonucleotide
carcargarcarcargarcar

SEQ ID NO: 4426 - DNA, 21 bp, Artificial Sequence
  Description of Artificial Sequence: Synthetic oligonucleotide
carcargarcarcarcargar

SEQ ID NO: 4427 - DNA, 21 bp, Artificial Sequence
  Description of Artificial Sequence: Synthetic oligonucleotide
carcarcargargarcarcar

SEQ ID NO: 4428 - DNA, 21 bp, Artificial Sequence
  Description of Artificial Sequence: Synthetic oligonucleotide
carcarcargarcargarcar

SEQ ID NO: 4429 - DNA, 21 bp, Artificial Sequence
  Description of Artificial Sequence: Synthetic oligonucleotide
carcarcargarcarcargar

SEQ ID NO: 4430 - DNA, 21 bp, Artificial Sequence
  Description of Artificial Sequence: Synthetic oligonucleotide
carcarcarcargargarcar

SEQ ID NO: 4431 - DNA, 21 bp, Artificial Sequence
  Description of Artificial Sequence: Synthetic oligonucleotide
carcarcarcargarcargar

SEQ ID NO: 4432 - DNA, 21 bp, Artificial Sequence
  Description of Artificial Sequence: Synthetic oligonucleotide
carcarcarcarcarcargar

SEQ ID NO: 4433 - DNA, 21 bp, Artificial Sequence
  Description of Artificial Sequence: Synthetic oligonucleotide
garcarcarcarcarcarcar

SEQ ID NO: 4434 - DNA, 21 bp, Artificial Sequence
  Description of Artificial Sequence: Synthetic oligonucleotide
cargarcarcarcarcarcar

SEQ ID NO: 4435 - DNA, 21 bp, Artificial Sequence
  Description of Artificial Sequence: Synthetic oligonucleotide
carcargarcarcarcarcar

SEQ ID NO: 4436 - DNA, 21 bp, Artificial Sequence
  Description of Artificial Sequence: Synthetic oligonucleotide
carcarcargarcarcarcar

SEQ ID NO: 4437 - DNA, 21 bp, Artificial Sequence
  Description of Artificial Sequence: Synthetic oligonucleotide
carcarcarcargarcarcar

SEQ ID NO: 4438 - DNA, 21 bp, Artificial Sequence
  Description of Artificial Sequence: Synthetic oligonucleotide
carcarcarcarcargarcar

SEQ ID NO: 4439 - DNA, 12 bp, Artificial Sequence
  Description of Artificial Sequence: Synthetic oligonucleotide
carcarcarcay

SEQ ID NO: 4440 - DNA, 12 bp, Artificial Sequence
  Description of Artificial Sequence: Synthetic oligonucleotide
caycarcarcar

SEQ ID NO: 4441 - DNA, 12 bp, Artificial Sequence
  Description of Artificial Sequence: Synthetic oligonucleotide
carcaycarcar

SEQ ID NO: 4442 - DNA, 12 bp, Artificial Sequence
  Description of Artificial Sequence: Synthetic oligonucleotide
carcarcaycar

SEQ ID NO: 4443 - DNA, 15 bp, Artificial Sequence
  Description of Artificial Sequence: Synthetic oligonucleotide
carcarcarcarcay

SEQ ID NO: 4444 - DNA, 15 bp, Artificial Sequence
  Description of Artificial Sequence: Synthetic oligonucleotide
caycarcarcarcar

SEQ ID NO: 4445 - DNA, 15 bp, Artificial Sequence
  Description of Artificial Sequence: Synthetic oligonucleotide
carcaycarcarcar

SEQ ID NO: 4446 - DNA, 15 bp, Artificial Sequence
  Description of Artificial Sequence: Synthetic oligonucleotide
carcarcaycarcar

SEQ ID NO: 4447 - DNA, 15 bp, Artificial Sequence
  Description of Artificial Sequence: Synthetic oligonucleotide
carcarcarcaycar

SEQ ID NO: 4448 - DNA, 15 bp, Artificial Sequence
  Description of Artificial Sequence: Synthetic oligonucleotide
carcarcarcaycay

SEQ ID NO: 4449 - DNA, 15 bp, Artificial Sequence
  Description of Artificial Sequence: Synthetic oligonucleotide
caycaycarcarcar

SEQ ID NO: 4450 - DNA, 15 bp, Artificial Sequence
  Description of Artificial Sequence: Synthetic oligonucleotide
caycarcaycarcar

SEQ ID NO: 4451 - DNA, 15 bp, Artificial Sequence
  Description of Artificial Sequence: Synthetic oligonucleotide
caycarcarcaycar

SEQ ID NO: 4452 - DNA, 15 bp, Artificial Sequence
  Description of Artificial Sequence: Synthetic oligonucleotide
caycarcarcarcay

SEQ ID NO: 4453 - DNA, 15 bp, Artificial Sequence
  Description of Artificial Sequence: Synthetic oligonucleotide
carcaycaycarcar

SEQ ID NO: 4454 - DNA, 15 bp, Artificial Sequence
  Description of Artificial Sequence: Synthetic oligonucleotide
carcaycarcaycar

SEQ ID NO: 4455 - DNA, 15 bp, Artificial Sequence
  Description of Artificial Sequence: Synthetic oligonucleotide
carcaycarcarcay

SEQ ID NO: 4456 - DNA, 15 bp, Artificial Sequence
  Description of Artificial Sequence: Synthetic oligonucleotide
carcarcaycaycar

SEQ ID NO: 4457 - DNA, 15 bp, Artificial Sequence
  Description of Artificial Sequence: Synthetic oligonucleotide
carcarcaycarcay

SEQ ID NO: 4458 - DNA, 18 bp, Artificial Sequence
  Description of Artificial Sequence: Synthetic oligonucleotide
carcarcarcarcarcay

SEQ ID NO: 4459 - DNA, 18 bp, Artificial Sequence
  Description of Artificial Sequence: Synthetic oligonucleotide
caycarcarcarcarcar

SEQ ID NO: 4460 - DNA, 18 bp, Artificial Sequence
  Description of Artificial Sequence: Synthetic oligonucleotide
carcaycarcarcarcar

SEQ ID NO: 4461 - DNA, 18 bp, Artificial Sequence
  Description of Artificial Sequence: Synthetic oligonucleotide
carcarcaycarcarcar

SEQ ID NO: 4462 - DNA, 18 bp, Artificial Sequence
  Description of Artificial Sequence: Synthetic oligonucleotide
carcarcarcaycarcar

SEQ ID NO: 4463 - DNA, 18 bp, Artificial Sequence
  Description of Artificial Sequence: Synthetic oligonucleotide
carcarcarcarcaycar

SEQ ID NO: 4464 - DNA, 18 bp, Artificial Sequence
  Description of Artificial Sequence: Synthetic oligonucleotide
carcarcarcarcaycay

SEQ ID NO: 4465 - DNA, 18 bp, Artificial Sequence
  Description of Artificial Sequence: Synthetic oligonucleotide
caycaycarcarcarcar

SEQ ID NO: 4466 - DNA, 18 bp, Artificial Sequence
  Description of Artificial Sequence: Synthetic oligonucleotide
caycarcaycarcarcar

SEQ ID NO: 4467 - DNA, 18 bp, Artificial Sequence
  Description of Artificial Sequence: Synthetic oligonucleotide
caycarcarcaycarcar

SEQ ID NO: 4468 - DNA, 18 bp, Artificial Sequence
  Description of Artificial Sequence: Synthetic oligonucleotide
caycarcarcarcaycar

SEQ ID NO: 4469 - DNA, 18 bp, Artificial Sequence
  Description of Artificial Sequence: Synthetic oligonucleotide
caycarcarcarcarcay

SEQ ID NO: 4470 - DNA, 18 bp, Artificial Sequence
  Description of Artificial Sequence: Synthetic oligonucleotide
carcaycaycarcarcar

SEQ ID NO: 4471 - DNA, 18 bp, Artificial Sequence
  Description of Artificial Sequence: Synthetic oligonucleotide
carcaycarcaycarcar

SEQ ID NO: 4472 - DNA, 18 bp, Artificial Sequence
  Description of Artificial Sequence: Synthetic oligonucleotide
carcaycarcarcaycar

SEQ ID NO: 4473 - DNA, 18 bp, Artificial Sequence
  Description of Artificial Sequence: Synthetic oligonucleotide
carcaycarcarcarcay

SEQ ID NO: 4474 - DNA, 18 bp, Artificial Sequence
  Description of Artificial Sequence: Synthetic oligonucleotide
carcarcaycaycarcar

SEQ ID NO: 4475 - DNA, 18 bp, Artificial Sequence
  Description of Artificial Sequence: Synthetic oligonucleotide
carcarcaycarcaycar

SEQ ID NO: 4476 - DNA, 18 bp, Artificial Sequence
  Description of Artificial Sequence: Synthetic oligonucleotide
carcarcaycarcarcay

SEQ ID NO: 4477 - DNA, 18 bp, Artificial Sequence
  Description of Artificial Sequence: Synthetic oligonucleotide
carcarcarcaycaycar

SEQ ID NO: 4478 - DNA, 18 bp, Artificial Sequence
  Description of Artificial Sequence: Synthetic oligonucleotide
carcarcarcaycarcay

SEQ ID NO: 4479 - DNA, 21 bp, Artificial Sequence
  Description of Artificial Sequence: Synthetic oligonucleotide
carcarcarcarcaycaycay

SEQ ID NO: 4480 - DNA, 21 bp, Artificial Sequence
  Description of Artificial Sequence: Synthetic oligonucleotide
caycaycaycarcarcarcar

SEQ ID NO: 4481 - DNA, 21 bp, Artificial Sequence
  Description of Artificial Sequence: Synthetic oligonucleotide
caycarcaycaycarcarcar

SEQ ID NO: 4482 - DNA, 21 bp, Artificial Sequence
  Description of Artificial Sequence: Synthetic oligonucleotide
caycarcaycarcaycarcar

SEQ ID NO: 4483 - DNA, 21 bp, Artificial Sequence
  Description of Artificial Sequence: Synthetic oligonucleotide
caycarcaycarcarcaycar

SEQ ID NO: 4484 - DNA, 21 bp, Artificial Sequence
  Description of Artificial Sequence: Synthetic oligonucleotide
caycarcaycarcarcarcay

SEQ ID NO: 4485 - DNA, 21 bp, Artificial Sequence
  Description of Artificial Sequence: Synthetic oligonucleotide
caycarcarcaycaycarcar

SEQ ID NO: 4486 - DNA, 21 bp, Artificial Sequence
  Description of Artificial Sequence: Synthetic oligonucleotide
caycarcarcaycarcaycar

SEQ ID NO: 4487 - DNA, 21 bp, Artificial Sequence
  Description of Artificial Sequence: Synthetic oligonucleotide
caycarcarcaycarcarcay

SEQ ID NO: 4488 - DNA, 21 bp, Artificial Sequence
  Description of Artificial Sequence: Synthetic oligonucleotide
caycarcarcarcaycarcay

SEQ ID NO: 4489 - DNA, 21 bp, Artificial Sequence
  Description of Artificial Sequence: Synthetic oligonucleotide
caycarcarcarcaycaycar

SEQ ID NO: 4490 - DNA, 21 bp, Artificial Sequence
  Description of Artificial Sequence: Synthetic oligonucleotide
caycarcarcarcarcaycay

SEQ ID NO: 4491 - DNA, 21 bp, Artificial Sequence
  Description of Artificial Sequence: Synthetic oligonucleotide
caycaycarcaycarcarcar

SEQ ID NO: 4492 - DNA, 21 bp, Artificial Sequence
  Description of Artificial Sequence: Synthetic oligonucleotide
caycaycarcarcaycarcar

SEQ ID NO: 4493 - DNA, 21 bp, Artificial Sequence
  Description of Artificial Sequence: Synthetic oligonucleotide
caycaycarcarcarcaycar

SEQ ID NO: 4494 - DNA, 21 bp, Artificial Sequence
  Description of Artificial Sequence: Synthetic oligonucleotide
caycaycarcarcarcarcay

SEQ ID NO: 4495 - DNA, 21 bp, Artificial Sequence
  Description of Artificial Sequence: Synthetic oligonucleotide
carcaycaycaycarcarcar

SEQ ID NO: 4496 - DNA, 21 bp, Artificial Sequence
  Description of Artificial Sequence: Synthetic oligonucleotide
carcaycaycarcaycarcar

SEQ ID NO: 4497 - DNA, 21 bp, Artificial Sequence
  Description of Artificial Sequence: Synthetic oligonucleotide
carcaycaycarcarcaycar

SEQ ID NO: 4498 - DNA, 21 bp, Artificial Sequence
  Description of Artificial Sequence: Synthetic oligonucleotide
carcaycaycarcarcarcay

SEQ ID NO: 4499 - DNA, 21 bp, Artificial Sequence
  Description of Artificial Sequence: Synthetic oligonucleotide
carcaycarcaycaycarcar

SEQ ID NO: 4500 - DNA, 21 bp, Artificial Sequence
  Description of Artificial Sequence: Synthetic oligonucleotide
carcaycarcarcaycaycar

SEQ ID NO: 4501 - DNA, 21 bp, Artificial Sequence
  Description of Artificial Sequence: Synthetic oligonucleotide
carcaycarcarcarcaycay

SEQ ID NO: 4502 - DNA, 21 bp, Artificial Sequence
  Description of Artificial Sequence: Synthetic oligonucleotide
carcaycarcaycarcaycar

SEQ ID NO: 4503 - DNA, 21 bp, Artificial Sequence
  Description of Artificial Sequence: Synthetic oligonucleotide
carcaycarcaycarcarcay

SEQ ID NO: 4504 - DNA, 21 bp, Artificial Sequence
  Description of Artificial Sequence: Synthetic oligonucleotide
carcaycarcarcaycarcay

SEQ ID NO: 4505 - DNA, 21 bp, Artificial Sequence
  Description of Artificial Sequence: Synthetic oligonucleotide
carcarcaycaycaycarcar

SEQ ID NO: 4506 - DNA, 21 bp, Artificial Sequence
  Description of Artificial Sequence: Synthetic oligonucleotide
carcarcaycaycarcaycar

SEQ ID NO: 4507 - DNA, 21 bp, Artificial Sequence
  Description of Artificial Sequence: Synthetic oligonucleotide
carcarcaycaycarcarcay

SEQ ID NO: 4508 - DNA, 21 bp, Artificial Sequence
  Description of Artificial Sequence: Synthetic oligonucleotide
carcarcaycarcaycaycar

SEQ ID NO: 4509 - DNA, 21 bp, Artificial Sequence
  Description of Artificial Sequence: Synthetic oligonucleotide
carcarcaycarcaycarcay

SEQ ID NO: 4510 - DNA, 21 bp, Artificial Sequence
  Description of Artificial Sequence: Synthetic oligonucleotide
carcarcaycarcarcaycay

SEQ ID NO: 4511 - DNA, 21 bp, Artificial Sequence
  Description of Artificial Sequence: Synthetic oligonucleotide
carcarcarcaycaycaycar

SEQ ID NO: 4512 - DNA, 21 bp, Artificial Sequence
  Description of Artificial Sequence: Synthetic oligonucleotide
carcarcarcaycaycarcay

SEQ ID NO: 4513 - DNA, 21 bp, Artificial Sequence
  Description of Artificial Sequence: Synthetic oligonucleotide
carcarcarcaycarcaycay

SEQ ID NO: 4514 - DNA, 21 bp, Artificial Sequence
  Description of Artificial Sequence: Synthetic oligonucleotide
carcarcarcarcarcaycay

SEQ ID NO: 4515 - DNA, 21 bp, Artificial Sequence
  Description of Artificial Sequence: Synthetic oligonucleotide
caycaycarcarcarcarcar

SEQ ID NO: 4516 - DNA, 21 bp, Artificial Sequence
  Description of Artificial Sequence: Synthetic oligonucleotide
caycarcaycarcarcarcar

SEQ ID NO: 4517 - DNA, 21 bp, Artificial Sequence
  Description of Artificial Sequence: Synthetic oligonucleotide
caycarcarcaycarcarcar

SEQ ID NO: 4518 - DNA, 21 bp, Artificial Sequence
  Description of Artificial Sequence: Synthetic oligonucleotide
caycarcarcarcaycarcar

SEQ ID NO: 4519 - DNA, 21 bp, Artificial Sequence
  Description of Artificial Sequence: Synthetic oligonucleotide
caycarcarcarcarcaycar

SEQ ID NO: 4520 - DNA, 21 bp, Artificial Sequence
  Description of Artificial Sequence: Synthetic oligonucleotide
caycarcarcarcarcarcay

SEQ ID NO: 4521 - DNA, 21 bp, Artificial Sequence
  Description of Artificial Sequence: Synthetic oligonucleotide
carcaycaycarcarcarcar

SEQ ID NO: 4522 - DNA, 21 bp, Artificial Sequence
  Description of Artificial Sequence: Synthetic oligonucleotide
carcaycarcaycarcarcar

SEQ ID NO: 4523 - DNA, 21 bp, Artificial Sequence
  Description of Artificial Sequence: Synthetic oligonucleotide
carcaycarcarcaycarcar

SEQ ID NO: 4524 - DNA, 21 bp, Artificial Sequence
  Description of Artificial Sequence: Synthetic oligonucleotide
carcaycarcarcarcaycar

SEQ ID NO: 4525 - DNA, 21 bp, Artificial Sequence
  Description of Artificial Sequence: Synthetic oligonucleotide
carcaycarcarcarcarcay

SEQ ID NO: 4526 - DNA, 21 bp, Artificial Sequence
  Description of Artificial Sequence: Synthetic oligonucleotide
carcarcaycaycarcarcar

SEQ ID NO: 4527 - DNA, 21 bp, Artificial Sequence
  Description of Artificial Sequence: Synthetic oligonucleotide
carcarcaycarcaycarcar

SEQ ID NO: 4528 - DNA, 21 bp, Artificial Sequence
  Description of Artificial Sequence: Synthetic oligonucleotide
carcarcaycarcarcaycar

SEQ ID NO: 4529 - DNA, 21 bp, Artificial Sequence
  Description of Artificial Sequence: Synthetic oligonucleotide
carcarcaycarcarcarcay

SEQ ID NO: 4530 - DNA, 21 bp, Artificial Sequence
  Description of Artificial Sequence: Synthetic oligonucleotide
carcarcarcaycaycarcar

SEQ ID NO: 4531 - DNA, 21 bp, Artificial Sequence
  Description of Artificial Sequence: Synthetic oligonucleotide
carcarcarcaycarcaycar

SEQ ID NO: 4532 - DNA, 21 bp, Artificial Sequence
  Description of Artificial Sequence: Synthetic oligonucleotide
carcarcarcaycarcarcay

SEQ ID NO: 4533 - DNA, 21 bp, Artificial Sequence
  Description of Artificial Sequence: Synthetic oligonucleotide
carcarcarcarcaycaycar

SEQ ID NO: 4534 - DNA, 21 bp, Artificial Sequence
  Description of Artificial Sequence: Synthetic oligonucleotide
carcarcarcarcaycarcay

SEQ ID NO: 4535 - DNA, 21 bp, Artificial Sequence
  Description of Artificial Sequence: Synthetic oligonucleotide
carcarcarcarcarcarcay

SEQ ID NO: 4536 - DNA, 21 bp, Artificial Sequence
  Description of Artificial Sequence: Synthetic oligonucleotide
caycarcarcarcarcarcar

SEQ ID NO: 4537 - DNA, 21 bp, Artificial Sequence
  Description of Artificial Sequence: Synthetic oligonucleotide
carcaycarcarcarcarcar

SEQ ID NO: 4538 - DNA, 21 bp, Artificial Sequence
  Description of Artificial Sequence: Synthetic oligonucleotide
carcarcaycarcarcarcar

SEQ ID NO: 4539 - DNA, 21 bp, Artificial Sequence
  Description of Artificial Sequence: Synthetic oligonucleotide
carcarcarcaycarcarcar

SEQ ID NO: 4540 - DNA, 21 bp, Artificial Sequence
  Description of Artificial Sequence: Synthetic oligonucleotide
carcarcarcarcaycarcar

SEQ ID NO: 4541 - DNA, 21 bp, Artificial Sequence
  Description of Artificial Sequence: Synthetic oligonucleotide
carcarcarcarcarcaycar

SEQ ID NO: 4542 - DNA, 12 bp, Artificial Sequence
  Description of Artificial Sequence: Synthetic oligonucleotide
carcarcaraay

SEQ ID NO: 4543 - DNA, 12 bp, Artificial Sequence
  Description of Artificial Sequence: Synthetic oligonucleotide
aaycarcarcar

SEQ ID NO: 4544 - DNA, 12 bp, Artificial Sequence
  Description of Artificial Sequence: Synthetic oligonucleotide
caraaycarcar

SEQ ID NO: 4545 - DNA, 12 bp, Artificial Sequence
  Description of Artificial Sequence: Synthetic oligonucleotide
carcaraaycar

SEQ ID NO: 4546 - DNA, 15 bp, Artificial Sequence
  Description of Artificial Sequence: Synthetic oligonucleotide
carcarcarcaraay

SEQ ID NO: 4547 - DNA, 15 bp, Artificial Sequence
  Description of Artificial Sequence: Synthetic oligonucleotide
aaycarcarcarcar

SEQ ID NO: 4548 - DNA, 15 bp, Artificial Sequence
  Description of Artificial Sequence: Synthetic oligonucleotide
caraaycarcarcar

SEQ ID NO: 4549 - DNA, 15 bp, Artificial Sequence
  Description of Artificial Sequence: Synthetic oligonucleotide
carcaraaycarcar

SEQ ID NO: 4550 - DNA, 15 bp, Artificial Sequence
  Description of Artificial Sequence: Synthetic oligonucleotide
carcarcaraaycar

SEQ ID NO: 4551 - DNA, 15 bp, Artificial Sequence
  Description of Artificial Sequence: Synthetic oligonucleotide
carcarcaraayaay

SEQ ID NO: 4552 - DNA, 15 bp, Artificial Sequence
  Description of Artificial Sequence: Synthetic oligonucleotide
aayaaycarcarcar

SEQ ID NO: 4553 - DNA, 15 bp, Artificial Sequence
  Description of Artificial Sequence: Synthetic oligonucleotide
aaycaraaycarcar

SEQ ID NO: 4554 - DNA, 15 bp, Artificial Sequence
  Description of Artificial Sequence: Synthetic oligonucleotide
aaycarcaraaycar

SEQ ID NO: 4555 - DNA, 15 bp, Artificial Sequence
  Description of Artificial Sequence: Synthetic oligonucleotide
aaycarcarcaraay

SEQ ID NO: 4556 - DNA, 15 bp, Artificial Sequence
  Description of Artificial Sequence: Synthetic oligonucleotide
caraayaaycarcar

SEQ ID NO: 4557 - DNA, 15 bp, Artificial Sequence
  Description of Artificial Sequence: Synthetic oligonucleotide
caraaycaraaycar

SEQ ID NO: 4558 - DNA, 15 bp, Artificial Sequence
  Description of Artificial Sequence: Synthetic oligonucleotide
caraaycarcaraay

SEQ ID NO: 4559 - DNA, 15 bp, Artificial Sequence
  Description of Artificial Sequence: Synthetic oligonucleotide
carcaraayaaycar

SEQ ID NO: 4560 - DNA, 15 bp, Artificial Sequence
  Description of Artificial Sequence: Synthetic oligonucleotide
carcaraaycaraay

SEQ ID NO: 4561 - DNA, 18 bp, Artificial Sequence
  Description of Artificial Sequence: Synthetic oligonucleotide
carcarcarcarcaraay

SEQ ID NO: 4562 - DNA, 18 bp, Artificial Sequence
  Description of Artificial Sequence: Synthetic oligonucleotide
aaycarcarcarcarcar

SEQ ID NO: 4563 - DNA, 18 bp, Artificial Sequence
  Description of Artificial Sequence: Synthetic oligonucleotide
caraaycarcarcarcar

SEQ ID NO: 4564 - DNA, 18 bp, Artificial Sequence
  Description of Artificial Sequence: Synthetic oligonucleotide
carcaraaycarcarcar

SEQ ID NO: 4565 - DNA, 18 bp, Artificial Sequence
  Description of Artificial Sequence: Synthetic oligonucleotide
carcarcaraaycarcar

SEQ ID NO: 4566 - DNA, 18 bp, Artificial Sequence
  Description of Artificial Sequence: Synthetic oligonucleotide
carcarcarcaraaycar

SEQ ID NO: 4567 - DNA, 18 bp, Artificial Sequence
  Description of Artificial Sequence: Synthetic oligonucleotide
carcarcarcaraayaay

SEQ ID NO: 4568 - DNA, 18 bp, Artificial Sequence
  Description of Artificial Sequence: Synthetic oligonucleotide
aayaaycarcarcarcar

SEQ ID NO: 4569 - DNA, 18 bp, Artificial Sequence
  Description of Artificial Sequence: Synthetic oligonucleotide
aaycaraaycarcarcar

SEQ ID NO: 4570 - DNA, 18 bp, Artificial Sequence
  Description of Artificial Sequence: Synthetic oligonucleotide
aaycarcaraaycarcar

SEQ ID NO: 4571 - DNA, 18 bp, Artificial Sequence
  Description of Artificial Sequence: Synthetic oligonucleotide
aaycarcarcaraaycar

SEQ ID NO: 4572 - DNA, 18 bp, Artificial Sequence
  Description of Artificial Sequence: Synthetic oligonucleotide
aaycarcarcarcaraay

SEQ ID NO: 4573 - DNA, 18 bp, Artificial Sequence
  Description of Artificial Sequence: Synthetic oligonucleotide
caraayaaycarcarcar

SEQ ID NO: 4574 - DNA, 18 bp, Artificial Sequence
  Description of Artificial Sequence: Synthetic oligonucleotide
caraaycaraaycarcar

SEQ ID NO: 4575 - DNA, 18 bp, Artificial Sequence
  Description of Artificial Sequence: Synthetic oligonucleotide
caraaycarcaraaycar

SEQ ID NO: 4576 - DNA, 18 bp, Artificial Sequence
  Description of Artificial Sequence: Synthetic oligonucleotide
caraaycarcarcaraay

SEQ ID NO: 4577 - DNA, 18 bp, Artificial Sequence
  Description of Artificial Sequence: Synthetic oligonucleotide
carcaraayaaycarcar

SEQ ID NO: 4578 - DNA, 18 bp, Artificial Sequence
  Description of Artificial Sequence: Synthetic oligonucleotide
carcaraaycaraaycar

SEQ ID NO: 4579 - DNA, 18 bp, Artificial Sequence
  Description of Artificial Sequence: Synthetic oligonucleotide
carcaraaycarcaraay

SEQ ID NO: 4580 - DNA, 18 bp, Artificial Sequence
  Description of Artificial Sequence: Synthetic oligonucleotide
carcarcaraayaaycar

SEQ ID NO: 4581 - DNA, 18 bp, Artificial Sequence
  Description of Artificial Sequence: Synthetic oligonucleotide
carcarcaraaycaraay

SEQ ID NO: 4582 - DNA, 21 bp, Artificial Sequence
  Description of Artificial Sequence: Synthetic oligonucleotide
carcarcarcaraayaayaay

SEQ ID NO: 4583 - DNA, 21 bp, Artificial Sequence
  Description of Artificial Sequence: Synthetic oligonucleotide
aayaayaaycarcarcarcar

SEQ ID NO: 4584 - DNA, 21 bp, Artificial Sequence
  Description of Artificial Sequence: Synthetic oligonucleotide
aaycaraayaaycarcarcar

SEQ ID NO: 4585 - DNA, 21 bp, Artificial Sequence
  Description of Artificial Sequence: Synthetic oligonucleotide
aaycaraaycaraaycarcar

SEQ ID NO: 4586 - DNA, 21 bp, Artificial Sequence
  Description of Artificial Sequence: Synthetic oligonucleotide
aaycaraaycarcaraaycar

SEQ ID NO: 4587 - DNA, 21 bp, Artificial Sequence
  Description of Artificial Sequence: Synthetic oligonucleotide
aaycaraaycarcarcaraay

SEQ ID NO: 4588 - DNA, 21 bp, Artificial Sequence
  Description of Artificial Sequence: Synthetic oligonucleotide
aaycarcaraayaaycarcar

SEQ ID NO: 4589 - DNA, 21 bp, Artificial Sequence
  Description of Artificial Sequence: Synthetic oligonucleotide
aaycarcaraaycaraaycar

SEQ ID NO: 4590 - DNA, 21 bp, Artificial Sequence
  Description of Artificial Sequence: Synthetic oligonucleotide
aaycarcaraaycarcaraay

SEQ ID NO: 4591 - DNA, 21 bp, Artificial Sequence
  Description of Artificial Sequence: Synthetic oligonucleotide
aaycarcarcaraaycaraay

SEQ ID NO: 4592 - DNA, 21 bp, Artificial Sequence
  Description of Artificial Sequence: Synthetic oligonucleotide
aaycarcarcaraayaaycar

SEQ ID NO: 4593 - DNA, 21 bp, Artificial Sequence
  Description of Artificial Sequence: Synthetic oligonucleotide
aaycarcarcarcaraayaay

SEQ ID NO: 4594 - DNA, 21 bp, Artificial Sequence
  Description of Artificial Sequence: Synthetic oligonucleotide
aayaaycaraaycarcarcar

SEQ ID NO: 4595 - DNA, 21 bp, Artificial Sequence
  Description of Artificial Sequence: Synthetic oligonucleotide
aayaaycarcaraaycarcar

SEQ ID NO: 4596 - DNA, 21 bp, Artificial Sequence
  Description of Artificial Sequence: Synthetic oligonucleotide
aayaaycarcarcaraaycar

SEQ ID NO: 4597 - DNA, 21 bp, Artificial Sequence
  Description of Artificial Sequence: Synthetic oligonucleotide
aayaaycarcarcarcaraay

SEQ ID NO: 4598 - DNA, 21 bp, Artificial Sequence
  Description of Artificial Sequence: Synthetic oligonucleotide
caraayaayaaycarcarcar

SEQ ID NO: 4599 - DNA, 21 bp, Artificial Sequence
  Description of Artificial Sequence: Synthetic oligonucleotide
caraayaaycaraaycarcar

SEQ ID NO: 4600 - DNA, 21 bp, Artificial Sequence
  Description of Artificial Sequence: Synthetic oligonucleotide
caraayaaycarcaraaycar

SEQ ID NO: 4601 - DNA, 21 bp, Artificial Sequence
  Description of Artificial Sequence: Synthetic oligonucleotide
caraayaaycarcarcaraay

SEQ ID NO: 4602 - DNA, 21 bp, Artificial Sequence
  Description of Artificial Sequence: Synthetic oligonucleotide
caraaycaraayaaycarcar

SEQ ID NO: 4603 - DNA, 21 bp, Artificial Sequence
  Description of Artificial Sequence: Synthetic oligonucleotide
caraaycarcaraayaaycar

SEQ ID NO: 4604 - DNA, 21 bp, Artificial Sequence
  Description of Artificial Sequence: Synthetic oligonucleotide
caraaycarcarcaraayaay

SEQ ID NO: 4605 - DNA, 21 bp, Artificial Sequence
  Description of Artificial Sequence: Synthetic oligonucleotide
caraaycaraaycaraaycar

SEQ ID NO: 4606 - DNA, 21 bp, Artificial Sequence
  Description of Artificial Sequence: Synthetic oligonucleotide
caraaycaraaycarcaraay

SEQ ID NO: 4607 - DNA, 21 bp, Artificial Sequence
  Description of Artificial Sequence: Synthetic oligonucleotide
caraaycarcaraaycaraay

SEQ ID NO: 4608 - DNA, 21 bp, Artificial Sequence
  Description of Artificial Sequence: Synthetic oligonucleotide
carcaraayaayaaycarcar

SEQ ID NO: 4609 - DNA, 21 bp, Artificial Sequence
  Description of Artificial Sequence: Synthetic oligonucleotide
carcaraayaaycaraaycar

SEQ ID NO: 4610 - DNA, 21 bp, Artificial Sequence
  Description of Artificial Sequence: Synthetic oligonucleotide
carcaraayaaycarcaraay

SEQ ID NO: 4611 - DNA, 21 bp, Artificial Sequence
  Description of Artificial Sequence: Synthetic oligonucleotide
carcaraaycaraayaaycar

SEQ ID NO: 4612 - DNA, 21 bp, Artificial Sequence
  Description of Artificial Sequence: Synthetic oligonucleotide
carcaraaycaraaycaraay

SEQ ID NO: 4613 - DNA, 21 bp, Artificial Sequence
  Description of Artificial Sequence: Synthetic oligonucleotide
carcaraaycarcaraayaay

SEQ ID NO: 4614 - DNA, 21 bp, Artificial Sequence
  Description of Artificial Sequence: Synthetic oligonucleotide
carcarcaraayaayaaycar

SEQ ID NO: 4615 - DNA, 21 bp, Artificial Sequence
  Description of Artificial Sequence: Synthetic oligonucleotide
carcarcaraayaaycaraay

SEQ ID NO: 4616 - DNA, 21 bp, Artificial Sequence
  Description of Artificial Sequence: Synthetic oligonucleotide
carcarcaraaycaraayaay

SEQ ID NO: 4617 - DNA, 21 bp, Artificial Sequence
  Description of Artificial Sequence: Synthetic oligonucleotide
carcarcarcarcaraayaay

SEQ ID NO: 4618 - DNA, 21 bp, Artificial Sequence
  Description of Artificial Sequence: Synthetic oligonucleotide
aayaaycarcarcarcarcar

SEQ ID NO: 4619 - DNA, 21 bp, Artificial Sequence
  Description of Artificial Sequence: Synthetic oligonucleotide
aaycaraaycarcarcarcar

SEQ ID NO: 4620 - DNA, 21 bp, Artificial Sequence
  Description of Artificial Sequence: Synthetic oligonucleotide
aaycarcaraaycarcarcar

SEQ ID NO: 4621 - DNA, 21 bp, Artificial Sequence
  Description of Artificial Sequence: Synthetic oligonucleotide
aaycarcarcaraaycarcar

SEQ ID NO: 4622 - DNA, 21 bp, Artificial Sequence
  Description of Artificial Sequence: Synthetic oligonucleotide
aaycarcarcarcaraaycar

SEQ ID NO: 4623 - DNA, 21 bp, Artificial Sequence
  Description of Artificial Sequence: Synthetic oligonucleotide
aaycarcarcarcarcaraay

SEQ ID NO: 4624 - DNA, 21 bp, Artificial Sequence
  Description of Artificial Sequence: Synthetic oligonucleotide
caraayaaycarcarcarcar

SEQ ID NO: 4625 - DNA, 21 bp, Artificial Sequence
  Description of Artificial Sequence: Synthetic oligonucleotide
caraaycaraaycarcarcar

SEQ ID NO: 4626 - DNA, 21 bp, Artificial Sequence
  Description of Artificial Sequence: Synthetic oligonucleotide
caraaycarcaraaycarcar

SEQ ID NO: 4627 - DNA, 21 bp, Artificial Sequence
  Description of Artificial Sequence: Synthetic oligonucleotide
caraaycarcarcaraaycar

SEQ ID NO: 4628 - DNA, 21 bp, Artificial Sequence
  Description of Artificial Sequence: Synthetic oligonucleotide
caraaycarcarcarcaraay

SEQ ID NO: 4629 - DNA, 21 bp, Artificial Sequence
  Description of Artificial Sequence: Synthetic oligonucleotide
carcaraayaaycarcarcar

SEQ ID NO: 4630 - DNA, 21 bp, Artificial Sequence
  Description of Artificial Sequence: Synthetic oligonucleotide
carcaraaycaraaycarcar

SEQ ID NO: 4631 - DNA, 21 bp, Artificial Sequence
  Description of Artificial Sequence: Synthetic oligonucleotide
carcaraaycarcaraaycar

SEQ ID NO: 4632 - DNA, 21 bp, Artificial Sequence
  Description of Artificial Sequence: Synthetic oligonucleotide
carcaraaycarcarcaraay

SEQ ID NO: 4633 - DNA, 21 bp, Artificial Sequence
  Description of Artificial Sequence: Synthetic oligonucleotide
carcarcaraayaaycarcar

SEQ ID NO: 4634 - DNA, 21 bp, Artificial Sequence
  Description of Artificial Sequence: Synthetic oligonucleotide
carcarcaraaycaraaycar

SEQ ID NO: 4635 - DNA, 21 bp, Artificial Sequence
  Description of Artificial Sequence: Synthetic oligonucleotide
carcarcaraaycarcaraay

SEQ ID NO: 4636 - DNA, 21 bp, Artificial Sequence
  Description of Artificial Sequence: Synthetic oligonucleotide
carcarcarcaraayaaycar

SEQ ID NO: 4637 - DNA, 21 bp, Artificial Sequence
  Description of Artificial Sequence: Synthetic oligonucleotide
carcarcarcaraaycaraay

SEQ ID NO: 4638 - DNA, 21 bp, Artificial Sequence
  Description of Artificial Sequence: Synthetic oligonucleotide
carcarcarcarcarcaraay

SEQ ID NO: 4639 - DNA, 21 bp, Artificial Sequence
  Description of Artificial Sequence: Synthetic oligonucleotide
aaycarcarcarcarcarcar

SEQ ID NO: 4640 - DNA, 21 bp, Artificial Sequence
  Description of Artificial Sequence: Synthetic oligonucleotide
caraaycarcarcarcarcar

SEQ ID NO: 4641 - DNA, 21 bp, Artificial Sequence
  Description of Artificial Sequence: Synthetic oligonucleotide
carcaraaycarcarcarcar

SEQ ID NO: 4642 - DNA, 21 bp, Artificial Sequence
  Description of Artificial Sequence: Synthetic oligonucleotide
carcarcaraaycarcarcar

SEQ ID NO: 4643 - DNA, 21 bp, Artificial Sequence
  Description of Artificial Sequence: Synthetic oligonucleotide
carcarcarcaraaycarcar

SEQ ID NO: 4644 - DNA, 21 bp, Artificial Sequence
  Description of Artificial Sequence: Synthetic oligonucleotide
carcarcarcarcaraaycar

SEQ ID NO: 4645 - DNA, 12 bp, Artificial Sequence
  Description of Artificial Sequence: Synthetic oligonucleotide
carcarcargay

SEQ ID NO: 4646 - DNA, 12 bp, Artificial Sequence
  Description of Artificial Sequence: Synthetic oligonucleotide
gaycarcarcar

SEQ ID NO: 4647 - DNA, 12 bp, Artificial Sequence
  Description of Artificial Sequence: Synthetic oligonucleotide
cargaycarcar

SEQ ID NO: 4648 - DNA, 12 bp, Artificial Sequence
  Description of Artificial Sequence: Synthetic oligonucleotide
carcargaycar

SEQ ID NO: 4649 - DNA, 15 bp, Artificial Sequence
  Description of Artificial Sequence: Synthetic oligonucleotide
carcarcarcargay

SEQ ID NO: 4650 - DNA, 15 bp, Artificial Sequence
  Description of Artificial Sequence: Synthetic oligonucleotide
gaycarcarcarcar

SEQ ID NO: 4651 - DNA, 15 bp, Artificial Sequence
  Description of Artificial Sequence: Synthetic oligonucleotide
cargaycarcarcar

SEQ ID NO: 4652 - DNA, 15 bp, Artificial Sequence
  Description of Artificial Sequence: Synthetic oligonucleotide
carcargaycarcar

SEQ ID NO: 4653 - DNA, 15 bp, Artificial Sequence
  Description of Artificial Sequence: Synthetic oligonucleotide
carcarcargaycar

SEQ ID NO: 4654 - DNA, 15 bp, Artificial Sequence
  Description of Artificial Sequence: Synthetic oligonucleotide
carcarcargaygay

SEQ ID NO: 4655 - DNA, 15 bp, Artificial Sequence
  Description of Artificial Sequence: Synthetic oligonucleotide
gaygaycarcarcar

SEQ ID NO: 4656 - DNA, 15 bp, Artificial Sequence
  Description of Artificial Sequence: Synthetic oligonucleotide
gaycargaycarcar

SEQ ID NO: 4657 - DNA, 15 bp, Artificial Sequence
  Description of Artificial Sequence: Synthetic oligonucleotide
gaycarcargaycar

SEQ ID NO: 4658 - DNA, 15 bp, Artificial Sequence
  Description of Artificial Sequence: Synthetic oligonucleotide
gaycarcarcargay

SEQ ID NO: 4659 - DNA, 15 bp, Artificial Sequence
  Description of Artificial Sequence: Synthetic oligonucleotide
cargaygaycarcar

SEQ ID NO: 4660 - DNA, 15 bp, Artificial Sequence
  Description of Artificial Sequence: Synthetic oligonucleotide
cargaycargaycar

SEQ ID NO: 4661 - DNA, 15 bp, Artificial Sequence
  Description of Artificial Sequence: Synthetic oligonucleotide
cargaycarcargay

SEQ ID NO: 4662 - DNA, 15 bp, Artificial Sequence
  Description of Artificial Sequence: Synthetic oligonucleotide
carcargaygaycar

SEQ ID NO: 4663 - DNA, 15 bp, Artificial Sequence
  Description of Artificial Sequence: Synthetic oligonucleotide
carcargaycargay

SEQ ID NO: 4664 - DNA, 18 bp, Artificial Sequence
  Description of Artificial Sequence: Synthetic oligonucleotide
carcarcarcarcargay

SEQ ID NO: 4665 - DNA, 18 bp, Artificial Sequence
  Description of Artificial Sequence: Synthetic oligonucleotide
gaycarcarcarcarcar

SEQ ID NO: 4666 - DNA, 18 bp, Artificial Sequence
  Description of Artificial Sequence: Synthetic oligonucleotide
cargaycarcarcarcar

SEQ ID NO: 4667 - DNA, 18 bp, Artificial Sequence
  Description of Artificial Sequence: Synthetic oligonucleotide
carcargaycarcarcar

SEQ ID NO: 4668 - DNA, 18 bp, Artificial Sequence
  Description of Artificial Sequence: Synthetic oligonucleotide
carcarcargaycarcar

SEQ ID NO: 4669 - DNA, 18 bp, Artificial Sequence
  Description of Artificial Sequence: Synthetic oligonucleotide
carcarcarcargaycar

SEQ ID NO: 4670 - DNA, 18 bp, Artificial Sequence
  Description of Artificial Sequence: Synthetic oligonucleotide
carcarcarcargaygay

SEQ ID NO: 4671 - DNA, 18 bp, Artificial Sequence
  Description of Artificial Sequence: Synthetic oligonucleotide
gaygaycarcarcarcar

SEQ ID NO: 4672 - DNA, 18 bp, Artificial Sequence
  Description of Artificial Sequence: Synthetic oligonucleotide
gaycargaycarcarcar

SEQ ID NO: 4673 - DNA, 18 bp, Artificial Sequence
  Description of Artificial Sequence: Synthetic oligonucleotide
gaycarcargaycarcar

SEQ ID NO: 4674 - DNA, 18 bp, Artificial Sequence
  Description of Artificial Sequence: Synthetic oligonucleotide
gaycarcarcargaycar

SEQ ID NO: 4675 - DNA, 18 bp, Artificial Sequence
  Description of Artificial Sequence: Synthetic oligonucleotide
gaycarcarcarcargay

SEQ ID NO: 4676 - DNA, 18 bp, Artificial Sequence
  Description of Artificial Sequence: Synthetic oligonucleotide
cargaygaycarcarcar

SEQ ID NO: 4677 - DNA, 18 bp, Artificial Sequence
  Description of Artificial Sequence: Synthetic oligonucleotide
cargaycargaycarcar

SEQ ID NO: 4678 - DNA, 18 bp, Artificial Sequence
  Description of Artificial Sequence: Synthetic oligonucleotide
cargaycarcargaycar

SEQ ID NO: 4679 - DNA, 18 bp, Artificial Sequence
  Description of Artificial Sequence: Synthetic oligonucleotide
cargaycarcarcargay

SEQ ID NO: 4680 - DNA, 18 bp, Artificial Sequence
  Description of Artificial Sequence: Synthetic oligonucleotide
carcargaygaycarcar

SEQ ID NO: 4681 - DNA, 18 bp, Artificial Sequence
  Description of Artificial Sequence: Synthetic oligonucleotide
carcargaycargaycar

SEQ ID NO: 4682 - DNA, 18 bp, Artificial Sequence
  Description of Artificial Sequence: Synthetic oligonucleotide
carcargaycarcargay

SEQ ID NO: 4683 - DNA, 18 bp, Artificial Sequence
  Description of Artificial Sequence: Synthetic oligonucleotide
carcarcargaygaycar

SEQ ID NO: 4684 - DNA, 18 bp, Artificial Sequence
  Description of Artificial Sequence: Synthetic oligonucleotide
carcarcargaycargay

SEQ ID NO: 4685 - DNA, 21 bp, Artificial Sequence
  Description of Artificial Sequence: Synthetic oligonucleotide
carcarcarcargaygaygay

SEQ ID NO: 4686 - DNA, 21 bp, Artificial Sequence
  Description of Artificial Sequence: Synthetic oligonucleotide
gaygaygaycarcarcarcar

SEQ ID NO: 4687 - DNA, 21 bp, Artificial Sequence
  Description of Artificial Sequence: Synthetic oligonucleotide
gaycargaygaycarcarcar

SEQ ID NO: 4688 - DNA, 21 bp, Artificial Sequence
  Description of Artificial Sequence: Synthetic oligonucleotide
gaycargaycargaycarcar

SEQ ID NO: 4689 - DNA, 21 bp, Artificial Sequence
  Description of Artificial Sequence: Synthetic oligonucleotide
gaycargaycarcargaycar

SEQ ID NO: 4690 - DNA, 21 bp, Artificial Sequence
  Description of Artificial Sequence: Synthetic oligonucleotide
gaycargaycarcarcargay

SEQ ID NO: 4691 - DNA, 21 bp, Artificial Sequence
  Description of Artificial Sequence: Synthetic oligonucleotide
gaycarcargaygaycarcar

SEQ ID NO: 4692 - DNA, 21 bp, Artificial Sequence
  Description of Artificial Sequence: Synthetic oligonucleotide
gaycarcargaycargaycar

SEQ ID NO: 4693 - DNA, 21 bp, Artificial Sequence
  Description of Artificial Sequence: Synthetic oligonucleotide
gaycarcargaycarcargay

SEQ ID NO: 4694 - DNA, 21 bp, Artificial Sequence
  Description of Artificial Sequence: Synthetic oligonucleotide
gaycarcarcargaycargay

SEQ ID NO: 4695 - DNA, 21 bp, Artificial Sequence
  Description of Artificial Sequence: Synthetic oligonucleotide
gaycarcarcargaygaycar

SEQ ID NO: 4696 - DNA, 21 bp, Artificial Sequence
  Description of Artificial Sequence: Synthetic oligonucleotide
gaycarcarcarcargaygay

SEQ ID NO: 4697 - DNA, 21 bp, Artificial Sequence
  Description of Artificial Sequence: Synthetic oligonucleotide
gaygaycargaycarcarcar

SEQ ID NO: 4698 - DNA, 21 bp, Artificial Sequence
  Description of Artificial Sequence: Synthetic oligonucleotide
gaygaycarcargaycarcar

SEQ ID NO: 4699 - DNA, 21 bp, Artificial Sequence
  Description of Artificial Sequence: Synthetic oligonucleotide
gaygaycarcarcargaycar

SEQ ID NO: 4700 - DNA, 21 bp, Artificial Sequence
  Description of Artificial Sequence: Synthetic oligonucleotide
gaygaycarcarcarcargay

SEQ ID NO: 4701 - DNA, 21 bp, Artificial Sequence
  Description of Artificial Sequence: Synthetic oligonucleotide
cargaygaygaycarcarcar

SEQ ID NO: 4702 - DNA, 21 bp, Artificial Sequence
  Description of Artificial Sequence: Synthetic oligonucleotide
cargaygaycargaycarcar

SEQ ID NO: 4703 - DNA, 21 bp, Artificial Sequence
  Description of Artificial Sequence: Synthetic oligonucleotide
cargaygaycarcargaycar

SEQ ID NO: 4704 - DNA, 21 bp, Artificial Sequence
  Description of Artificial Sequence: Synthetic oligonucleotide
cargaygaycarcarcargay

SEQ ID NO: 4705 - DNA, 21 bp, Artificial Sequence
  Description of Artificial Sequence: Synthetic oligonucleotide
cargaycargaygaycarcar

SEQ ID NO: 4706 - DNA, 21 bp, Artificial Sequence
  Description of Artificial Sequence: Synthetic oligonucleotide
cargaycarcargaygaycar

SEQ ID NO: 4707 - DNA, 21 bp, Artificial Sequence
  Description of Artificial Sequence: Synthetic oligonucleotide
cargaycarcarcargaygay

SEQ ID NO: 4708 - DNA, 21 bp, Artificial Sequence
  Description of Artificial Sequence: Synthetic oligonucleotide
cargaycargaycargaycar

SEQ ID NO: 4709 - DNA, 21 bp, Artificial Sequence
  Description of Artificial Sequence: Synthetic oligonucleotide
cargaycargaycarcargay

SEQ ID NO: 4710 - DNA, 21 bp, Artificial Sequence
  Description of Artificial Sequence: Synthetic oligonucleotide
cargaycarcargaycargay

SEQ ID NO: 4711 - DNA, 21 bp, Artificial Sequence
  Description of Artificial Sequence: Synthetic oligonucleotide
carcargaygaygaycarcar

SEQ ID NO: 4712 - DNA, 21 bp, Artificial Sequence
  Description of Artificial Sequence: Synthetic oligonucleotide
carcargaygaycargaycar

SEQ ID NO: 4713 - DNA, 21 bp, Artificial Sequence
  Description of Artificial Sequence: Synthetic oligonucleotide
carcargaygaycarcargay

SEQ ID NO: 4714 - DNA, 21 bp, Artificial Sequence
  Description of Artificial Sequence: Synthetic oligonucleotide
carcargaycargaygaycar

SEQ ID NO: 4715 - DNA, 21 bp, Artificial Sequence
  Description of Artificial Sequence: Synthetic oligonucleotide
carcargaycargaycargay

SEQ ID NO: 4716 - DNA, 21 bp, Artificial Sequence
  Description of Artificial Sequence: Synthetic oligonucleotide
carcargaycarcargaygay

SEQ ID NO: 4717 - DNA, 21 bp, Artificial Sequence
  Description of Artificial Sequence: Synthetic oligonucleotide
carcarcargaygaygaycar

SEQ ID NO: 4718 - DNA, 21 bp, Artificial Sequence
  Description of Artificial Sequence: Synthetic oligonucleotide
carcarcargaygaycargay

SEQ ID NO: 4719 - DNA, 21 bp, Artificial Sequence
  Description of Artificial Sequence: Synthetic oligonucleotide
carcarcargaycargaygay

SEQ ID NO: 4720 - DNA, 21 bp, Artificial Sequence
  Description of Artificial Sequence: Synthetic oligonucleotide
carcarcarcarcargaygay

SEQ ID NO: 4721 - DNA, 21 bp, Artificial Sequence
  Description of Artificial Sequence: Synthetic oligonucleotide
gaygaycarcarcarcarcar

SEQ ID NO: 4722 - DNA, 21 bp, Artificial Sequence
  Description of Artificial Sequence: Synthetic oligonucleotide
gaycargaycarcarcarcar

SEQ ID NO: 4723 - DNA, 21 bp, Artificial Sequence
  Description of Artificial Sequence: Synthetic oligonucleotide
gaycarcargaycarcarcar

SEQ ID NO: 4724 - DNA, 21 bp, Artificial Sequence
  Description of Artificial Sequence: Synthetic oligonucleotide
gaycarcarcargaycarcar

SEQ ID NO: 4725 - DNA, 21 bp, Artificial Sequence
  Description of Artificial Sequence: Synthetic oligonucleotide
gaycarcarcarcargaycar

SEQ ID NO: 4726 - DNA, 21 bp, Artificial Sequence
  Description of Artificial Sequence: Synthetic oligonucleotide
gaycarcarcarcarcargay

SEQ ID NO: 4727 - DNA, 21 bp, Artificial Sequence
  Description of Artificial Sequence: Synthetic oligonucleotide
cargaygaycarcarcarcar

SEQ ID NO: 4728 - DNA, 21 bp, Artificial Sequence
  Description of Artificial Sequence: Synthetic oligonucleotide
cargaycargaycarcarcar

SEQ ID NO: 4729 - DNA, 21 bp, Artificial Sequence
  Description of Artificial Sequence: Synthetic oligonucleotide
cargaycarcargaycarcar

SEQ ID NO: 4730 - DNA, 21 bp, Artificial Sequence
  Description of Artificial Sequence: Synthetic oligonucleotide
cargaycarcarcargaycar

SEQ ID NO: 4731 - DNA, 21 bp, Artificial Sequence
  Description of Artificial Sequence: Synthetic oligonucleotide
cargaycarcarcarcargay

SEQ ID NO: 4732 - DNA, 21 bp, Artificial Sequence
  Description of Artificial Sequence: Synthetic oligonucleotide
carcargaygaycarcarcar

SEQ ID NO: 4733 - DNA, 21 bp, Artificial Sequence
  Description of Artificial Sequence: Synthetic oligonucleotide
carcargaycargaycarcar

SEQ ID NO: 4734 - DNA, 21 bp, Artificial Sequence
  Description of Artificial Sequence: Synthetic oligonucleotide
carcargaycarcargaycar

SEQ ID NO: 4735 - DNA, 21 bp, Artificial Sequence
  Description of Artificial Sequence: Synthetic oligonucleotide
carcargaycarcarcargay

SEQ ID NO: 4736 - DNA, 21 bp, Artificial Sequence
  Description of Artificial Sequence: Synthetic oligonucleotide
carcarcargaygaycarcar

SEQ ID NO: 4737 - DNA, 21 bp, Artificial Sequence
  Description of Artificial Sequence: Synthetic oligonucleotide
carcarcargaycargaycar

SEQ ID NO: 4738 - DNA, 21 bp, Artificial Sequence
  Description of Artificial Sequence: Synthetic oligonucleotide
carcarcargaycarcargay

SEQ ID NO: 4739 - DNA, 21 bp, Artificial Sequence
  Description of Artificial Sequence: Synthetic oligonucleotide
carcarcarcargaygaycar

SEQ ID NO: 4740 - DNA, 21 bp, Artificial Sequence
  Description of Artificial Sequence: Synthetic oligonucleotide
carcarcarcargaycargay

SEQ ID NO: 4741 - DNA, 21 bp, Artificial Sequence
  Description of Artificial Sequence: Synthetic oligonucleotide
carcarcarcarcarcargay

SEQ ID NO: 4742 - DNA, 21 bp, Artificial Sequence
  Description of Artificial Sequence: Synthetic oligonucleotide
gaycarcarcarcarcarcar

SEQ ID NO: 4743 - DNA, 21 bp, Artificial Sequence
  Description of Artificial Sequence: Synthetic oligonucleotide
cargaycarcarcarcarcar

SEQ ID NO: 4744 - DNA, 21 bp, Artificial Sequence
  Description of Artificial Sequence: Synthetic oligonucleotide
carcargaycarcarcarcar

SEQ ID NO: 4745 - DNA, 21 bp, Artificial Sequence
  Description of Artificial Sequence: Synthetic oligonucleotide
carcarcargaycarcarcar

SEQ ID NO: 4746 - DNA, 21 bp, Artificial Sequence
  Description of Artificial Sequence: Synthetic oligonucleotide
carcarcarcargaycarcar

SEQ ID NO: 4747 - DNA, 21 bp, Artificial Sequence
  Description of Artificial Sequence: Synthetic oligonucleotide
carcarcarcarcargaycar
